United States Patent Application Publication US 2026/0271966 A1 - sequence listing, part 7

SEQ ID NO: 42 - DNA, 3968902 bp, Bacillus amyloliquefaciens (residues 1-1,984,451 of 3,968,902)
  source 1..3968902: mol_type = genomic DNA; strain = Strain 071 ELA202071 ATCC PTA 1267064
tttggactgaatgaaatatttaattcctcgccgtcaatctggtcagccagcacagcttcgaccactttcccgatttccggagaatttgatgaaatctccagcgaatccgccggtttggcagaaagctttacaacgttgttgcggccttctctcgccaataaagaagcacggtctatcgcctgtaaaaattccttcgtgttcacgacgatttccgttttgctttcctgcggaattaagctggtcgtgtccggatagtttccgtcaagcaatcttgagaagaacaatacgtttttcgctttgaacagaacttgggtttctgtaatgacgatatcaaccagttcttggttgtcatcaagaattttgctcagctcggttaagcttttcccaggaatgaccacgttataagagctgtcttccggaatatcaagcttcgcctttcttaaagcgagtcggtggctatccgtggcagtgcataataattcaccgttttcgactttccagtttacacctgtcaagatagggcgtgtttctgaggcggacacagcgaacacggtttggcgaatcaggtttttcaaaagatccgtcggaatctgaatggcgtgatgctcttcgatttgcggcagatgcggatattcatctgcatcaaggccgtttaaattaaattcggcttttccggaacggataatcgttaaatattgattttgaacttcgatttcaacagtcgccatcggaagttttttaacgatttcgctgaagaaacgggcttgcagcacgatacttcccggctgatcgatcgtcacgatttctttatcatcttcttctttcggaatgaatgactcgattgaaatatcagagtcacttcctgtgaaagatactccttcatctgaggcgacgatcttaataccggtgagaatgggaattgtggttctggatgaaacggcttttagaacgtcttgtacactttcgactaaacgatctttttgaatcgtaaatttcatgtttatcctcctaacggataatataattaatatattttaaaaatagcagtagtaatagtagggcctgtggatttgtggataagttgtgaaaaagacaggaaacacagcctatccacatgtggacagactgtgtatggctatgaaaaagttattcacactttccccgattcatccgagggcactattatttaagcagttcttttatttctttcacctgctgctgaagctgctcgtcatcaatcagcagttttgaaatcttttcatgggcgtgaatgacggttgtatggtctctgccgccaaattcttccccgattttaggcaaagaagaatccgtcatttctcttgaaagatacatcgcaatttgtcttgggaacgccacggatttcgtgcgctttttcgctttgaaatcttcaagcttaatgttgaactgctgtccgacaatccgctgaatctcttttatcgtaatgaccttcggcttagaagacggaatgatatctttcaatgcttctgcagccaggtctgcgttaatgtctttattgattaaggatgaataggcgacaacccggattaatgccccttccagttcgcggatgttgctgtcaatctgattcgcgatgtaaagcatgacctcgttcggaatatcaagaccttccgccttcgctttttttctcaggatggcaatccgcgtttccagatccggcggtgtgatatccgtaatcaatccccattcgaaccgcgaacgcaggcggtcttcaagggttgggatctctttcggcggtctgtcgctggaaatcacgatttgtttgctttcttcatgaagcgtgttgaatgtatggaaaaactcttcctgtgtttgttcttttccggctaaaaattgaatatcatctatcaaaagtacatcaacgttccggtagcgattgcggaaatcaacggctttattatcgcggattgagttgatgaattcatttgtgaatttttcagaagacaggtacaccactttggctgaaggattatgatcaatgacataatggccgatcgcgtgcattaagtgggtttttcctaagccgactcccccgtatataaataaagggttgtacgctttagcgggtgcttccgccacagccagtgatgctgcatgggcgaatcggtttcccgatccgatgacgaatgtgtcgaatgtatatttcgggttgagcatgctttggggaaaatcagacggttcctcttttgccgcttttttcacttgcggtttcggtaaaaagttttcttcgtcctgattttgaggaatgacaaatttgacgctcaattcttccccggttaattcgtatatggtatctgcaatgagatgtaagtacctggactccagccagtctcgggcaaattcattgggagcggtgatggttaaggtatccccttgcagcgaatgggctttcgtcgacttcatccaagtttcgaaactcggtttgcttagctttttctcaatttgagctagagcttgattccaaagatccaatatattctccattatccggcacagccctccttttctttaaaaatcagcgccctttccctgttatagaacacaaaaaaagagcatatggctctgaccattcgtacacacgaaatgttgaaaacatatagtatagtagaaaaacagcttttcgacaaattccacaagttgtggacaacaatctacacaagctgtgtgaaaacaatccacaacttatccacagtttgtggataaagagaatgggctggataagtaattaagagttaaaacacaaatataatatcaaattaagcgaggacttgcaatggttctcgtaatcttatccacaaacctgacaacttgttgaaaaatctttgtccacatgggttagcaatgtgaaaatgttgtcgataacgactgtggatattaaaaaaaggccaaaaaattatccacatgtcgtttttccgggggagcgcggcttttttttttgcgttaaaaaaaggaatatgaaaaataaggtttctaaactggttaaggtatgttatcctattatggttgtaagaaataaaagcactgctgaagttgacaatgaataggcagcacaaatataataagtaagactgtctttaacagctattcctcgagggaggtgtcataaatgaaaagaacattccaaccgaataaccgtaaacgcagtaaagttcatggcttcagaagccgtatgagttcaaaaaacggtcgtctagtattagcacgccgtcgccgcaaaggcagaaaagtattatcagcttaggccactgaataatgtcagtggtcttttttcacattaagagagtgagatgtcatgcgtcgcccggtactggagaaatttcttcagtattccggcggcccgttttttttagatagaaataaaagtttctgcgagtgaatatcggagtgaattaaagtgaagaagcgaaatcggttaaagaaaaatgaagattttcaaaaagtgtttaaacgcggaacgtctatggcaaaccgccagttcgtgctgtatacgcttgatcagccgaaacaggaagagctccgggtagggctttctgtcagtaaaaaaatcggcaatgccgtcgtgcgcaatcgggtgaagcggttaatcagacaggctgttcaggaggaaaaagagctgctcaagccgaaagattttattattatcgcaagaaaacccgccggcgacctcagttttgaagaaacgaaaaagagtctgcagcacttattcagaaaaacctcattatataagaaatcttcgtcaaaatagctcatattttgttttcttcacgtttttaaaagcgcttccttttatttggcgaaaaatgaacgccatttgaaactgaaagatgctaaaatacatacaaggttcataaagattggtataggaggaaacgttcttgaaaaggagaatatggttactactgagtatggtcggtatgctcgtgctgctggccgggtgctcgagtgtgaaagagccgattacggcgaatagtccgcatttctgggacaaatatgttgtgtatccattgtcagaagttattacgtacgtagcgaaactgacgggcgataactatggtttatcgatcatcatcgttacgattttaattcgtctgctgattctgccgctgatgatcaagcagcttcgaagctcaaaagcgatgcaggcgctgcagcctgaaatgcagaagctcagagaaaaatacagctctaaagatcaaaaaacgcagcagaagcttcagcaggaaacgatggccctgttttcaaagcacggggtaaacccgctggcgggatgtttcccgatcctgattcaaatgccgattttgatcggattctaccacgccattatgcgtacgcaagccatatcacagcacagctttttatggtttgatttaggagagaaggatccttactatattcttcctatcgttgccggtgtggccacttttgtccagcagaagctgatgatggccggaaatccgactcagaatcctcaaatggcaatgatggtatggattatgccgatcatgatcatcgtatttgcgatcaacttcccgagcgcgctttctctgtattgggtagtcggaaacctgtttatgattgctcagacattccttattaaaggacctgacattaaacacgatccggaaacgcagaaagcgggaggaaagaaaaagtgaagaaggtgactgctgcgggacggaatgtcgaagaagcagttcaatcaggccttcaggaacttcaactgacgaaagatcaagtagaaataacggtggtgcaagaagaatacaaagggtttttgggtattttcggaaaaaagaatgcgatcgtagaactggaagagaaaaaaaatcctgttcatgaagcgaaagtgtatttggaagaaatcatccattccattgccggaccttctgagattgttacggaagaaaacaagaaaacagtctgttttcacattaaaggtgaaaaagcggcgctgcttattggcaaaagaggacaaacactcaatgccctggaaacattgacgcagcttgttttgaaccgcggctccggccagtatcgccaagccgttgtcgacgctgagaattatcggcggaaaagaagagaaattctggagcagctggcaaacaggctggccaagcaagtgtcgaaaacgaaaaaagatgtgcatttagaaccgatgccgtcaggtgaaagaaaaatcatccatgacgcgctgtcaaagcatccaaatatcaaaacgttttctaccggtgaaggccggtaccgccatctcgttatttcccataaagatagcagaaaaccgaagtccgggtaaaatcggaacttcggtttttttattggtaaaaatggctctattcctaagcagaatcgcactttttgcgtttaagttttttctttttcggtctatgctgttgataaaaaaggttttaggaaataaaattaattgttattcacatgtggataagttaaagtaataagggatgaatttctgcctttgtggataacgtatcttccacttcaaaccaaactatgttatcttttaattttggcgtaaataaaattttttatatagatggaaacagagataaagagaggtgaacagcatggatacaattgcagcgatttcaactccgatgggtgaaggcgcgattgcgatcgttcggctgagcggccctgaagccgtaaagatcgccgacaaaatgtacaagggtccgaaaggcaaaacgctcagttcggcagaatcgcataccattcattacgggcatatcgcggacagcacgacgggacggattattgaggaagtcatggtgtctgttttaagagcgcccagaacattcacaagggaagatgtcattgaaatcaactgtcatgggggtattgtgacggttaatcaggtgctccagcttgctttaagagaaggtgcgagactggcagaacccggtgagtttacgaagcgcgcatttttaaacggacggattgacctttcacaggcggaagcggtgatggatctgatcagggccaaaacggaccgtgccatgaatgtcgccatgaaccagatggaaggacggctttccgcgcttgtccgccgtctgcgtgatgagttgttagaaacacttgcccatgttgaggttaatatagattatccggaatatgatgacgtcgaagaaatgacgcatcagcttttagtggagaaggcaagcggcgtgaagaaagaaatcgaggcgctgctccgtacgtctgagcaggggaaaattttgcgtgagggactgtctaccgtgatcatcggccgtccgaacgtcggaaaatcctctctgcttaacagccttgtccatgaaacgaaggcgatcgtaactgatattccgggaacgacgcgtgatgtgattgaggaatatgtcaatgtccgaggcgtgccgcttcggcttgtcgataccgccggaatccgtgagacagaagacatcgtcgaaagaatcggtgtggaacggtcacggcaggttctgaaggaagcggatctcattttgcttgtgcttaaccacagcgaagagctttctgaagaagatgtgaaattgtttgaagcggttgagggaatggatgtcattgtcactatgaataagacggaccttgaggctaagattgacgctgagcgcgtcaaggaactggcgaaaggccggcctgtcgtcacgacctcattgctgaaagaagaaggcattcaagatttagaggaagcgattcagtcgctattttatacaggagcgatcgaaagcggagatctcacctatgtcagcaacacccgtcatatctcgattctgcatcaggcaaagcaagcgattgatgatgcgctgaacggaattgaacaggatgttccgattgatatggtgcaaattgatttgacaaggtgctgggagctgctgggcgaaatcatcggtgatgccgtccacgaaagcttaattgatcagctcttttcacaattttgtttaggtaaataaaagggaggaaaaaaccatggggtatgaagcaggccaatacgacgtgattgtcatcggcgccgggcatgccggtgttgaggctgccctcgcatccgcgcgccagggagccaaaacgcttgttttgacgatcaatcttgatatggttgcgtttatgccatgtaatccgtctgtcggcggccccgcgaaagggattgtcgtccgcgaaattgacgcgctcggcggagaaatggctagaaatatagataaaactcatattcaaatgagaatgctgaatacaggaaaaggtccggccgtacgggcgctgcgtgcgcaggcggataaattccaatatcagcacgaaatgaagcatacgctggaaaaaacaccgaatttgacacttcttcaagggattgccgagcgtttaatcattgaagacggggagtgccgcggtgtcattacgcaaaccggtgctgaatataaggcaaaaacggtcgtgctgacaaccggaacgtatttaagagggcggatcattctcggtgatctgtcttactcaagcggtccgaataaccagcagccgtctattaaactttctgagcacttagaggagctcggttttgatctcgtccgttttaaaacgggcacgcctcctcgtgtctcaagcgattccattgattacagcaaaacagaaatccagccgggggacccggttccgcgcgctttctcatatgaaacggttgaatacattaccgatcagctgccttgctggctgacttacacgagtcctgagactcatgagatcatcgacagcaacctgcatcgttcgccaatgtattccggtatgattaaaggaacgggaccgagatactgcccttcgattgaagataaagtcgttcggtttaatgataaaccgcgtcatcagattttccttgagccggaaggcagaaatacgcaggaagtatacgttcaaggtttatccacgagtcttcctgaggacgtgcagcagcggatgctggcgaccattccgggactggaaaaggtgcagatgatgagagccggatacgcgattgagtatgacgcgattgtaccgacgcagctctggcctacactggagacgaaaaaaatccctaacctgtacacggccggtcaaattaacggtacatcaggttatgaggaagcagccgggcaaggaattatggcagggatcaacgcaggccgcaaagcgcttggaaaagaagaagtgatcctcagccgttccgatgcttatatcggtgtattgattgatgatttggtaacgaaaggaaccaatgaaccgtaccgtctgctgacttcacgggcggaatacagactgctgctccgtcacgacaacgcggatcttcgtctgacggaaatcggccacgatatcggcttaatttctgatgagcgctatgaagcgtttgagaagaaaaaagcggcgatcgaggcggagaaaaaacgtctctggtctgttattatcaagccgtctcctgagaatcaggaatatatccgttcactcggcggaagcgagctgaaagacggagtgcgcggcacagatttaatgaaacgtccggaaatgaactatgaaacagtgacaaaacttgcgcctgcagattctccggttccgcaagatgtggcggaacaagtggaaattcaggtgaaatatgaaggatatatcgaaaaatccttgcagcaagtggaaaagctgaagaaaatggaaaacaaaaaaatccctgatcggattgattatgacgccattaaaggaattgctactgaagcccgtcaaaagctgaaagaagtgcgtcctttatcagttgctcaagcgtcccgtatttccggcgtcaatccggcagacatttcaatcctgctggtatacctggagcagggccgtattgccaaggtagctgaatagaaaggatgacggcatgaatatagaggaatttacatccagtttagcggagaaagggatttccctttctgaccgccagctggagcaattcgagttgtattaccggatgctcgtggaatggaacgaaaaaatgaatctgacatccatcactgagaaaaaggaagtttatctcaagcatttttatgattcgataacggcggcattttatattgattttgaaaaggttaccactctttgtgatgtcggcgccggcgccggttttccaagcctgcccatcaaaatctgcttcccgcatctgcatgtcaccatcgtcgattcactgaataagcggattacgtttttggaaactctctctgatgctttacaattagagcatacgacatttgtccatgacagagcggagacattcggacaacggaaagacgtacgggaaagcttcgatctcgtgacggcccgtgcggtggcgcgtctgtcggtcctgagtgagctttgtctgccgctggccaagaaaaacggcgtatttgcggcactaaaagcagcagcagctgatgaagagctgaaagcggggcaaaaggcgattaaagtattgggaggagagcttgaacaagttcattcctttacacttcctgttgaagaaagtgaacggaacatcatgatcattcgcaagacgaaaagcactccgaaaaaatatccgagaaaaccgggtactccaaataaatcgccaattgaagggtaatttagacagcctgatgtgacaattccatcatattttctgcaaaattgatgaagatacagcaggaaaaaccatgagaaaatagaattataaaaatggcagtttttaaaggtggtgtaggtacatgaagcattcattctctcgtttcttcgggtttggtgagaaggaagaggaaccggagatagctgagcatgatacaaacaaagaagagatactcgaaataccggtacatgctatcgttcccaaccgttttcagccacgcaccattttctcagatgaaaaaatcaaagagttagcaatgactatccatacacacggcatcattcagccgattgttgtcagacatacagaagatgaaggacaatatgagctcattgcgggtgaaaggcgctggagagcggtacagacgcttgaatgggagaagattcccgcaattattaaagatttttctgatacggaaacagcatctgtcgctttgattgaaaacctgcaaagggaagaattgtcctccattgaggaagctcatgcgtacgcaaggctgttagaacttcatgatttaacacaggaagccttggcgcagcgcttaggaaaaggccagtcaacgattgcgaacaagctccgattgttaaagctcccggaacccgtccaggatgcgattatggagaaaaaaattacggaacgtcatgcaagagcactgattccgctcaaacagccggagtttcaggtcacattgcttgcggaaatcattgagaaaagcttaaacgttaagcagacggaagacagagtggtgaaaatgcttgaacagaataagcagaaaccaaagccgagacgcaaagcgttcagcagggatacaagaattgcgatgaatacgattcgtcagtcactgtctatggtagaagacagcggcgtcaggctgaacactgaagaagaagaattcgaagagtacatccagcttaccattcggatacctaaataaaaactctcctgatcagcaggggagtttttattttaatcaaaaaactattttgagataatgatagatttattgtgcactatacattatttatgtaaaattttatctttttgtgtcgtgaattgtctttttacagtcaaaaaagtcactttatcggagaacttatattagaaagtgtctttttcgtttacatttttttcacttgctgataaacaaattatgaaaaaaataaaacgctttactctttttttgataagatagaaacaagacagtacatgttcatgtgaaggtaggtgacatcgtgggaaaaatcatagcaattacgaaccaaaaaggcggagtcgggaagacgacgacttctgttaatctgggggcttgcttggcttacataggtaaaagggttcttcttgttgatattgatccgcagggcaatgcaacgagcggattagggattgaaaaagccgatgtggatcattgtgtgtacgacattttagtagatgatgcagatgttacagatattattaaaccgacttcagtagagaacttagatgtcattccggccacgatccagcttgcgggagcggaaatcgaattggttccgacgatctcacgggaggtcaggctgaaaagagcattagaatcagtgaaacaaaattacgattacatgattattgattgtcctccgtctctcgggttattaacgattaatgcgcttaccgcttcagattcagtcgttatcccggttcagtgcgaatactacgctcttgaaggattgagtcaattattaaatacagttcggcttgtgcaaaaacatttaaataccgacttaatgatagaaggagtgcttctgacgatgcttgatgccagaacgaatctcggcattcaagtgatagaagaggtaaagaaatactttagagataaagtgtatcaaaccattattcctcgaaatgtccgtttaagtgaggcgccgagtcacggcaagccgatcatattatacgatccgcgttcgagaggtgcggaagtatatttagatttagcaaaggaagtggcagcgaatggctaaaggcgggctcggaaaagggattaacgcgttgtttaatcaggttgatttgtctgaagagacagtggaagagattaaaatcagtgatttgcgccccaatccttatcagccaagaaaacaatttgacgatgagtcattagctgaactgaaggaatccatcattcagcatggcattcttcagcccattatcgtgagaaaatcattgaagggctatgatattgtagccggcgaacgccgttatcgcgccgcaaaacttgccggtaaagagacagtgccggctatcgtgcgggatttatctgaatcgctgatgcgggaaatcgctcttttggaaaaccttcagcgtgaagacttatcaccgcttgaagaagctctggcatatgactcactgctgaagcatttggatttaacccaggaacagctcgctaaacggctcggaaaaagcaggcctcatattgccaaccatttaagactgctgacgctgccggaaagcatccagaacctcattgcagaaggtacgttatccatgggacacggcagaaccttgcttggtttgaaaaataaaaacaagcttgaaccgcttgtgaagaaagtggttgaagaacagctgaacgtccgtcagcttgagcagctgattcagcagttaaacaacaatgttccacgtgaaacaaagaaaaaagaacctgtccaagatgtggtgttaaaagagcgggaatcgtatttgcaaaattacttcggaacaacagtaaatattaagagacaaaagaaaaaagggaagattgagattgagtttttctcaaatgaagatcttgaacgtatcctagaactattgtctgaaagagaagcgtaaaaaccatctttttaaaaaaagatggttttttatatacgtcttgtcagcttatgaaatggactgagccgttcctgccggccttctgatttatctgtcagctgtaacccctctgctaaaacatttgccatgctcataacaagatgaagcctcgtattctgcaggacaaaatactccataaacccgctgacattgacgattccattgatatggacgtcaccgatttcaggaagatctttttgaacacctgctccgggcttcagcggcccatcgccgatttgaaatgaccctacgcttttgacgcggcctaaacaagcatcaaccgctataataaacggatttttatgtagatgttgaatatctttcagcttgtctttcatattgacggcgtgaacaggatctgacagcgtgccgtaaacgtgcaatctgcctaaattcattttttctaactttgttcctacgagcggacctaatgaatctccggtcgaccgatctgtgccgatacacacggtgactaacggtctgccggctgctttacgtaaagatgaagtaaggatcgcttgtatttgattcgcagcagaagaatccgtatgagatacatattgttttgcccgttcttgagaaaaaagcccgccttttcgattcataaggttcacttccttgtcatgtcatacgagtattacattgttgtttttggtgatgtatggttgtttacagtatatccagcgctgcctttttttatgcttatgtcatgatcagcatgccggttgtttgaaaagagcgggatagaaaaaagaacccagagcagttattctctaagttcatgaaagaaataagaccatttgatctacatcaacatattgctgatgatctaatttcagcgctcttttttctgtagagaagaggataaatcctaactgagcgtagagttttattgcgggttcatttgttgaggtaacagagagatggagctgttctgtgtccttcatcttttttgctcggctgatggcttccgtcattaacgcttttcccgcgcctgaccctcggtgtttgggggaaatatacatagaaccgataaccgcaatgtgtcttagtttaaacagcggatgcttggagatcttgaggattcctatcagtctgtctttttcaaaggcgccaagcacgatggcattgtcggcttcaagcctggctttaaatttttcggacggccattctttctcctcatcatagctgacggcaaatgcgtccgggtgatcttttaaagctttgagcctgatatcggtataaggctgggtatcatttgcggttaaacgcctgatgtacatggtttgagctccttgcataagtgaatttttctgaatagtcaatcgtcgatatcataccatatttgtcccatttgtatgaatgattgccgctgtcactcaatatagtagcaatatgcggagatgatcagaaattttatgaggtgatgagggtgtggagagccgggatgaagtggatgctgctcatattaagcagccagattggggctgggtatgcaagcgggcaggaaatatggcagtttttcggtgtcgaaagcggactggctattgtattgtttacagtcatgtttacgatttcggcttatattgtgttgaagatcagctatcgggttcaatcaacgcactttttacctgtgcttgagcatctgatggggccggctcttgctaaagtctatgatgtgcttattatgttttatttgttttcaatgacgatggttatgattgccggcggcggtgtgacgctgcaaatgtacaagctgccgttttggatcggtatttttcttctttgcattgtgaccgtcggtttattcttttgggatataaaaggaatattatctctgaatagtattttgataccgattcttgtagcggggctgttatatgcattggtcttttttcagacaacccatcattacacgtggacgatagatttgacccgccagtataattggccggcaagcattaccttcacgtctttaaacatcctttctgttgtcgctgttctttcttcaatcgggaaagatatgaagggactgggagaagcgaaaatcgcaagcgttgcaagcgggctgattttcggtatgatttcatttgtttacaatgaaacgcttgtacagctttcaggcagtcttacacaatatgagattcctcttttcgctgtccttgaaggcgctccttatccgttatttctttgtatggccgccgtgctttttttagccatctatacgacaaccgtgaccggtctgttcgggctgtccagccgcatgcttgcatttgtgaaattgccgagatggacgctcgtatctcttcttttagctgtgatggtgccttttacgacaatcggtttttcagatttgatcgccattttatatcccatttacgggcttttaagtctttatttgctggtatgtcttcttctttaccctattttagggagatggaaaaaagtataatgctcattttgagtgcggccgttgctcttatcctgtttttttttgtacaataaataaagcagtctatggagagaggtgaagggtcttggcggataaagactttggcctgaatgatattgttgaaatgaagaaaccgcatccttgcggtgaaaacaggtggaaaatcattcggatgggaatggatattcggattaaatgcacgggttgttcccacagtgtcatgattccgagaagagattttgagagaaagctgaaaaaagtactcgtcaagcatgaggagcctacatcataagggctggcgctcatgctttttcatatagaggagaggaagaggcccgatgagcaaagtgcatcagtcagcgtgcccgctgaattgctgggacagctgcggctttttggtgacagttgaggatggaaaggtgacgaaagtagacggagacccgaatcatcccattacggaagggaaaatttgcggccgtggcagaatgctggaggcgaaaacgaatgcgccggaacggcttcgttttcctttaaaaaagatagacggcgaatttgtccgcatttcctgggagcaggcgttagatgaaattgctgaaaaaatggcggtgattaaggagacgttgggcactgccgcagtgctgcacagtcatgattacgccaataacggtcttttgaaggcgctcgaccagcgttttttcaatggatacggcggtgtgacggagattgcgggcagcatttgctggggttccggcattgaagcgcagcgctgggatttcgggcgttcttacgggcatggaccgcttgatatttatcacagcaagcatgtgatcgtatggggcagaaacgtgtcccggacgaatatgcacctctatcatcatctgcagcaggtgaagaaaaaaggagcgacactgacggtcattgatcctatttttaacccgactgccaagcttgccgatcggtatatatccgtcaaacccggcatggatggatggcttgcggcgggtgttttaaaaatattatgccaaaccggcagaaccgattccgatttcattcaaaggcattcggtcggttttgaagaaatagaaaagcttctgcagacgatttctattgaggagatcattgagaaaacagaaacgtctttagaagtgcttgaatatcttgctgatttatatgctgacggtcccgcctccacttttatgggtcttgggatgcagagatataaaaacgggggcgggacgatacggtggattgacgctttagctgcggcgagcggaaatgtcggtatcaaaggcggcggcgcaaacttcggaaatgtgcaagtcggtgaaagctttgcaaaggccgagctcacccggcctgatctgaagaaaagttcgagaacgttttcgatgatgactcaagccgaagaggcgctgaatgcagccgatccgccgattgagatgatcatcgtgacgtgcggcaatccgctgacacaggtgccgaatacaaaaaaagtgaaggaagcatttgaaaaaacaccggtcacagtggccattgattcggtcatgaccgatacggcgaagctctgtgactatgtgctgccgacggccgttgttttcgaagaggaagatatttattattccagcatgtatcatcactatgttcaatatggcaagaagcttgcggaaccgcagggagaggcaaaatcagaccgctggatctggacggaactcgcaaagcgtctcggattcggggagctctttgattacagtacggaagatttcttaaaaatggggctctcttctttggagaaagaaggaatcacccttgagcaattaaaggaaaaaggacatatgccgcttccggtcaaacaggttccgtggagtgattttcaatttttaaccccgagcggaaaatttgaattcgtctcgtcactggcagaagagaaaggatacagcggcctccctcaattggaggtgccggaggagtctgtttatcatgacgccggactggccgggaaatatccgtatatgctgctgtccattcacccgcagcgctccaatcattcacagcacgtgccgtttattgaaaagcttcagcagattcaggtggacctgtcgccggatatcgccgaggagctttcacttcaagacggagatacggcagaggtatacaatgaccgcggccgtctgcgcggcagggtgaaaatcatgaagcaggctcacccgaagacggtgaatatagatgaaggcatgtgggcggcattcggaggctccgtcaacatgctcacaaaggattcaaattccgataatggaatgggaagtacgctttttgactgtctggtagcggttaaaaaaggataatctaaggagagagagggcgggaaatgcttttttctcagcttgtcttttcctatgaacctccttataattgctctaggtttacaatacgtttatacgatgatggtttgatatagaggagatgaaagaatggctttaactgctggaattgtcggtttgccgaatgtcggaaaatcgacgttatttaatgcaattacccaggctggtgccgaatcagccaactacccgttctgtacaattgatccgaacgtgggaatcgtggaagtgccggatgaacgtctgcaaaagctgactgaattggtgaacccgaaaaaaacggtgccgactgcgtttgaattcactgatatcgcggggatcgtaaaaggcgcatcaaaaggtgaaggactcggaaataagtttctttctcatatccgtcaggttgatgcgatctgccacgttgtacgcgcattcgctgatgacaatattacgcacgtgtcagggaaagtcgatccgattgacgatattgaaacgatcaatcttgaattgattcttgccgacatggagacagtcgaaaaacgtatcacgcgtgtaagcaagcttgcaaagcaaaaagacaaagaagcggtttttgaatttgacattctgtctaaattaaaagaagctttcgaacaagaaaagcctgcccgttccgttgaatttacggaagaacagcaaaagcttgtgaagcagcttcatttgcttacgtcaaaacccgtgctttatgtagcaaatgtaagcgaggatgaagtggctgatccttcagataatgaatatgttgcgaaaatccgggagtacgccgcgggtgaaaacgccgaagttatcgtcgtctgcgcgaaaattgagtctgaaattgctgaattggaaggcgaagaaaaacaaatgttccttgaggagctcggcatcgaagaatcaggtcttgatcagctgattaaagcgtcatactctcttctcggccttgcgacatactttacggcgggcgaacaggaagtgcgcgcatggacattcagaaaaggcatgaaagctcctgagtgtgcgggtatcatccacactgactttgaacgcggctttatccgcgctgaaacggttgcttatgaagaccttttggcaggcggcggaatgtccggagcgaaagaagccggaaaagtgcgtctggaaggtaaggaatatgtagtccaagacggagatgtcattcatttccgatttaatgtataggacacagttgtaaagggacaagagctttggtataatataaacttgtgagtaatagaattattgctccttgcccattatagggccgcttagaccaaaaggaggtgcaaacagatgaaaaagtacgaagttatgtacattatccgtccgaacattgacgaagagtcaaagaaggcagttatcgagcgtttcaacaacgtattgacttctaacggagcggagatcactggaacaaaagattggggtaaacgtcgtcttgcttacgaaatcaacgatttccgtgacggtttctaccaaatcttaaacgttcagtctgaagctgcagcggttgctgaattcgaccgtttagctaagatcagtgacgatatcattcgccacatcgttgttaaagaagaagaataagcaatttgaaatatataatgttaaaaggtggtctttcatatgcttaaccgagttgtattagtcggaagactgacaaaagacccagagcttcgttatacgccaagcggtgcggctgtcgccacgttcactcttgctgtgaatcgtacattcacgaaccagtccggagaacgtgaagccgatttcattaattgtgtcacttggagaagacaagccgaaaacgttgcaaactttcttaaaaaaggaagccttgccggcgtagacggccgactccagacaagaaattatgaaaaccagcagggacagcgtgtcttcgtgacagaagtccaagctgaaagtgttcaatttcttgagcctaaaaacagcggcggttctggatcaggcggatacaacgaaggaaacagcggcggaggccaatactttggcggaggccaaaatgataatccgttcggcggaaatcagaacaaccagagacgaaatcaagggaacagctttaatgatgatccatttgccaacgacggcaagccgattgacatctcggatgatgatcttccgttctaatagattatcgctatattcataacgagaaaggtgggaaatgacaatggcaggaggacgcagaggcggtcgtgcgaaacgccgtaaggtttgttacttcacttctaacggcattacgcacatcgattacaaagatgtagatcttcttagaaagtttgtttctgagcgtggtaaaattttacctcgccgtgtaactggaacaaacgcgaaataccaacgtaaattgactatcgcgatcaaacgcgcacgtcaaatggctttacttccatacgtaactggcgagtaagccgaaagaaaagagcaagagcctgcgggctcctgctctttttttatatcagtccccctccatcctgccgaaatgtttcacatgaaacatggaagtgcttcttacacctttgttatcttgctcctctattcaaaaacgcgtacttatgcaatgaatttgtttatactgaaaaacagggggtggctgagatggagacagacagaaatatcctgactgatgaaaagtggagcgcaatcatacataatgatgcttcttatgacggggcattttattatgcagtaaaaacgacaggaattttctgccggccttcttgtaaatcgagagttccgaataaagaaaacgtgctggtgtttgatacggctgatgcagcgctcgagaaacattttcgtccctgtaaaaggtgccggccgaacggtcttcgtcttcctgatgaagaatggattgctcaaatcattgaatacattgaacgccattatcacgaatccctgactctgagtgtactggccgaaatgtgtcacggcagcccctatcatttacagcggacatttaaaaaaatcaggggaatatccccgattgcgtatatacagaaaataagattgtcgaaggcggaacaccttttaaagcatactgatatgacagtcatggagatcgctctgactgtcggaattccaaacacagcgcatttcgcgaccctttttaaaaagggaaccgggagttcgcccacagaatacagaaaaacggccaaaatgggacagggaggttcaatatgagtaaagagcctatgatctattggacactcttcacacggaatgattggagcctgtatacagccgccacatctaaggggctttgctttatagggtcaaatcatggaagctttgaagagcttgagcagtgggcaaaaaaatcactgccgcaataccgattggcacgtgatgatgaaaagctggcgccttacacggcagagttgtccgagtacattgaaaatggcagatcagctttttcagtgccggtggatctttacggaacagaatttcagcttgctgtatggaaagcgcttatggacataccgtacggcgagatatactcctattcggatatagcaaaaatgattcagaaaccggcagccgtaagagccgtgggcgctgcgattggaaaaaatccggtattgattacggttccgtgccatcgcgtcatcggaaaaaacgggaaactgaccggattcagaggcggtttagaaatgaaaaagcagctgctggcattagagggcggaaacattgaaacactggaataccggctgagccggacaggagggatcacatgaaactgatgtcttggaatgtaaacggcttgcgtgccgtgatgaaaaagatagatatcaatacttacgttcaggaaacggaagccgatattctatgtctgcaagaaacaaaagtacaggacggacaagtatcattacagcctgaaggatatcacgcctattggaactatgcggtgaaaaaaggctactcaggcacggctgttttttcgaaagaaaagccgctgcacgtgctctatggactggggattgacgaccatgatcaagaaggacgggtgatcacgcttgaatttgagcatgtgtttgtcgtcaactgttatacgccgaatgccaaacgcggattagagcgaattgattaccgtcttcaatgggaagccgattttaaggattatctgcagaagcttgaccggaagaagcccgtgatcttatgcggcgatctgaatgtcgcacacagggagatagacttaaaaaatccgaaagccaaccggaagaacgccggtttctcggagcaggagcgggaagcgttcagcgccctgctgaacgcgggatttaccgactcattccgctatttatatcctgatcgggaaggcgcctattcctggtggtcttacaggacgaacgcacgtgagaaaaacatcggctggcggcttgattacgtcattgtttcagacagactgaagcagcggatcagccaagcggccatttgtgccgatatcatgggttctgaccattgccctgttgaaatgacagtggatttatgatgagatagcagtaagagaaatccactcttgctgcttttttatcactgaaaatggaggagcacatggcaaatataaaagagattgcgaaactggcgaatgtgtcggtggccaccgtatcacgcgtattaaaccgacacccgtacgtatctgaggagaaaaggcgtcttgtgaatcaagtgatgaaggagctggattatacccctaatcgaaccgccattgatctgattcgcggaaagaccaatacaatcggcgtgattttgccgtacagtgaccatccctgctttgacaaaattgtaaacggtatcacgaaggaagcgtttgcccatgattacgtgacaacccttctccccaccaactatgaccccgctatagagatgacatatttcgaactgctgaaaatgaaaaagattgacggactgattgtcacgtcccgcgcgaatgaatgggagaccgccgtgccttacctggaatacggtcccattgtcgcttgtgaatatacacagcatcaagagattccctgcgcttataatgacaggcaggcagcatacagagaaagctttttgtatttgaaaaaccgcgggcatcaagacgttgcttttacatgtgtgcgggaagcggaaaaaagcccgagtacggccgacaaggtaaccgcatataaggcggtcttcggctctcttgatgaaactcgcattctggtcggatgccatgatatggacgacggaaagcgagcgggtgagcacttctggggtctcgacaaggcgccgacggccatctatgcgcacagtgatgacgtggctgccggcttgtaccagtttgcgaaagaacagaaatgggacgcggagatcatcggcgagggaaatctgagcgtcagccgggcattgaatattccatccctggaacttcatttggaacgggtcggaaaggaagcatttttattattttttcacgaagaaacggctaaaaaacaaattatgcatcaatttcagcggaaaaaagtcttgagctgaaatgggtttcatgctttataaatagattgagaaaaaaagggaggcggacatatgcgaattgaacatgcagcgatatgggtgaaagatttggaacggatgaaagagttttatgagacatacttcggcgccaagaccaatgacctttatcataatgagaaaaaagatttcaaatcgtattttctttcatttgactccggatgcaggctggaacttatgaaaaaaggcggcattgatgaagctccggcacagaatatgaccggatgggcgcatctcgcattttctacaggcagcaaggagcgggtgaatgaattgacggaaacgtttaaaaacgatggatttcaggttgtaagcggcccgcgcgtgacgggtgacggatattatgagagcgtgatagaggatggggaaggcaatttgatagaaatcacagtgtaacagtgcggagtgattccgcactgtttttttgattaaatttgctgtgcatttgttttcgggccgaagaggattaacaaaacggaacatagaagccagcagccgccgatgaacaaaaagacgctgatgtagccgagcttaacggcaataaatccgacgagcagggagccgaatatgttggaaaaacggccgagcccgtatgccagcccgctcccggccgagcgatattccgtaggatacggctccgatgtgtaggcgtataagtttgaggtgaagatccgttccgtgacgttgacgacaaacccaaacacaataatcatgacgggaataaacgtcatgccgtataacagtccggcaatggcagtcagaaaggcgcttgcggccagaatccatttcctttggaacgtctcggatatcatggaaccgagcaatgcgccaagcggtgcgccgacagagtgaagcacattgtaccacagcgttttttccacggtgatcccgttgcttttcagcaggctgggcacccatgaagcaaagccgtaaaagccaaaggtttcaagaatccataccgctgacaggatgatggtgatctttaaattcctgccctgaaacagccctaagtagcctgcgtgcttcactgtatgtacttctgccgcctcttttggcgcgggaagcgggcctttttctttctctgcacgtgcttcaagacggttcataatggcgtttgcctgatcatatgcgccccgattttcgtgccagcgcggcgattcctcaagccggcggataaaaaagaaataaatgagaccggccgccccccatacgaatacgagccgccacccccatgagcctaaaggaatgacaaaagcggaaacaacgtttgtgacgggaaccccgattagaccgatcatggcgcaaagggagatgtattttccccgtacggaggatggaaaaaattccgccaaatagctgttcgtcacaatcatggcggccgcgacgccgagaccggtcaagaagcggaaaatcattaaggacggaatgtcccatgccagcgcattcagaaaagatgagatcgaaaagacaaggacaaaacaattcagcgcttttttcctgccgatccgatcggacagccttccgccgatggacgcgcctaaaaacatgcccaggaatgatgcggccgtgatgtcggcaatggtggacagcttcacgccccaatgctcaatcagcgccggagccacgttgctgagcgtaaacagatcagcgagatcaaaaaaatagatgattccgagagcggttaatacttgataatgcacacgtgaaatggggagacggtctaatcggttcgctacatttgagaatgtctgatgtttcataaaaaaccccctgactttgcaattgtaatcagaaaatactgtgaatttatctgacgaatacattataaaggtctttttttggcaaaaacagagtgtaaataaccagagccaaaggaaacggcatagcgctttcttcttaaaatatataacatttcctatatctgtttctgtttatattgtaaaatgttgaaggaaaggaagttgatgcataaatatgaatacgtttgtacgcccagcagagggaagaaatagtgtatcgagatatattctttctctgttggtcattgtgggtttgttctttttcggaagcatactgaccgtgttttatatgtttctcacgtccgctttcaatccttcactgacgataaattgggatgagggggcattaagtgacccgctggcggatatttatttacagcatatcgtctatttcatagcgattccgggcatttggatagcggttcgtttcattatgaaacggcggtttttatccatcatcacaccgaatcagtcgctgaactggaagaggattttctttggattcggcacatatgttgtgctgatgtttgtcgcggggctgattgattttacaattcatccggatcgtttcatgcttcaggaattccatgcttcacgttttctgctgctgttagcggcggccgtcttgttggtgccgattcaaacctctgcggaggaatttctctttcgcggttttctgcttcagttcgccggaaaattgacggcaaacgcggtggttctgacagtcattatcggcggattattcggcgcacttcatttcgggaatccggagatggaaaatggagctctctgggcgggaatcggatatgtcaccatcggcatgatctggacctttatcacgattaaaacgggcagtctggagatgtcccttggcggtcacgctgccaataatatgtttttatttatctttctcacagaggatcattcggtgtacggcggcattccgtcgatatttacaacagcagccggcggctatgaaatatatgattgcatatcgactctggtgatcaatatcatcttcgcatggctcgcattccgttttgtgaaaaaagaaaagcagcaggccgcctaggctctgctgctgatttgtaaggtgttcatcgcttcatcaatatccgtcgtcggcctccggcaggcgaaattctcacaaatgtagaccgttgtcttcccgtcgatcatttgataacccgcggcaaagtcagaaatgccggcaagctcttccggatgttctgcggcgagaatcgtataggcgggagtgaaatgctcctgaagcgcctcaatgaaacgttttctgtccgggtcatctttccttccgaaaacaacgatttctttttggggcattgtatgtgccagtacgctttgcatgaagaaagcgttgctgctcggataggcctctatttcccgtttgaacacagaaaacatcgcttcggctttttcaatcagtgatatatcacccgtcaggcggccgagacgaagcagctgtacggcagccgcgctgtttccggaaggcacggccccgtcataaacctctttttccctgacaagaagggtctcagcatcattccccgtaaagaagaaacctccgtgccgttcatcccagaacagctccagcatgcttgtacataacgttttcgctttctgcagataagacggattaaaacccgcttcatacagttcaagataagcccagatgagaaaagcataatcatcgataaaccctttgtttttcacttcgccctcgcgatagcggaccatgacgcgcccgtccggcatgaggtgccgttcgagaaagcggatcgctgtttccgccatgctgagaaagtcaggctcgtgaaatacctttgcggcttttgccagcccggcaatcatgagcgcgttccatgaggtcagcactttgtcatctgtatgcggatagcttctgttttcacgggcctccagcaattttgttcttgcctcttcaaggcgttcggccagctcatgtccggtgaggccggtctcttcgaggatggcctcacgccgcgtgaaaatgaggtgcgggatgttttcgccttcaaaattgccttgatctgtgatgttatacaccttgcagtaaagcgggccgagttcatcaccgagaaggttcataatttcttttttggaccatatgtaatatttcccctcacggccttcggtatcagcgtctaaagctgagaaaaagctgccgtcttcatgcatcatttcccgctgaataaacgttacgatctgcagcgcaatctgtttgtagcgctcattacctgtgacttggcaggcttctgtatatgcggtcaggagaagggcgttgtcatacagcattttctcaaaatgcggcacgagccattcattatcagtcgagtagcgggcaaagccgaacccgatgtggtcaaaaatcccgccgttcgccatgccgtcgagtgtcttggttacgccggccaaagcctgttccttgcccgtatagctgtagtagcgaagcagaaacatgagcatatgcggcatcggaaatttcggagcctggccgaacccgccgtacactgtatcaaacccgccggccagctggcgatacgtgtcatgaacagcctgttcgccaagcatgccctcggccgggtgaaccttgacttcaagatgagcggcggcgttttcggcgatatcctcgacatgctgccggtcattcgcaaacgtttcggacagatgttcaagcacatcgataaagcccggacggttaaatttgctcgtcttcggaaaatatgtccccgcataaaacggcttctgatctggggtgacgaacacgttcagcggccacccgccctgccccgtcatcagctggcagattctcatatacacggaatccacatcaggccgctcctcacgatcaaccttgatggctatgaatttatcgtttaacataccggcgatctcttcgtcctcaaaggattcgtgggccattacgtgacaccagtgacacgtcgaatagccgatgctgacaagaaccggcttgttttcgcgttttgctttttcgaaggcttcttttccccaaggatgccagtttacggggttgtgggcgtgttggagcagatagggggacttctccgtgattaaactgttgggtttactattgtttggcatgggctcacctgctttctattaatatttgtatgtttaacataccacaatcctctaaaaaaattcatacactcaactttgtgaaccacacccaagtcattaaaaaggagaactgcttatgactctattttcagggttaaacttcatctaccttattgctttttagataagaaataaggatttaaaatctttatcgttttatttactgttagataggtgaaacacaccccggcgactgtaaccatcccgcctgtcagtgcaataaacacaggtacttcacctaaccacacccaagaaatgaccaaggctatagcgggtgttaaataaagtgaaatggttgcttctgaagcaccgacgagtgaagttacatacgcaagtgcaaagtaaggcacaaccgttggtaataaacctaagtaaacgatagacaatgttgagttcattgaagcgttcaaaaactcttcccctaagccaggcaaaaacacaagcataggtattgtcccgccccaaatagtgaatgtaacgaatggaataaatccatatttttttatatagcgagcttgaaaaacgaaataaatactctccgaaaaagctgccagcaggattaacaaaatgccgttcactgaatttgtatagtttcctgccccaaatgaaatgatcgacacacccaataaacttatgatagagccaatccatttataaagcccaaaatgttcaccaaaaaacagacgagataacattgcagaaaaaataggtgtcatggtcacgagtaagcttgctgtccctgcgctaactgttttttctccgatattcagcaaaatgtgatatagtgcaaaacctaaaaatcctaacgataaaatagcagggatatccttcatgtcaggtaaacgcatatgagtcaaaacagcaaaaaccaacagtgccattgacccaatcaacaagcgaaacaaagcgaggtgttccggcgtgtaactctccaaacccgcgcgaattcccgggaaagctgatgcccacaacccaatcatcagactgtaagatatgccgattcgaactgttttcttttgcatctttctcactcctctttacaaaaaccaaccagttatttaatgtgtttctatattaataaagatttgatgatatgacttcaaccagttaaatagattttgacccaaccacttttaaggaggatcctttttatgagcgctccagaagaaaaaaagatgaaaaagcttcctaagtacatacaaatcattcaatttataaaagagaaaataggaaatggagaatggccgattggaagtaagattccaagccagcgcacgcttgctaaacactttgaggtgaacaggagcacagtcattacagctttagaggaattgacggcggatggattaatcgaaggcagaatgggcaaagggacagttgttacgaacaatacatggacacttttggctaagaattccgctcccgattgggatcagtatgtaacctccggaatccagcagccaagccaaaaaatcgttcaagagatcaataaatcagaatcgaattctgatcttatacagctcagtaaaggagaactttcacatgagatttttcctttagctgttatgaaagagatcatgggaaaggtatctcaaaacatagaggcattcgggtatgaggaaccaaaaggctatttgcctttgagagaggcattaagcggctatttaagaacaatcggcattcaagcgtctccttcttccattcttattgtttcgggcgcactgcaagccttgcagcttatatcaatggggcttttacaaaggggatcgaccgtatttctcgatcagccttcctatctttattcattacacgtatttcaatcagccggtatgaagctgactggagttcctatggataataatggacttttgccggaacacatccacatggcaaggggggaacgggggagggctatcttatatacaaatccttgttttcataatccgacaggtattttaatgtcaaaaaagagacgagaagaaatccttgcggcaagtgagaatgcacagcttcccattattgaagatgacatttatcgtgagttatggatagatgagattcctccagatcctattaaaacaatagataaaaatgggcatgtgctttacataggcagtttatcgaaaacgttaagtccgggcttgaggattggatggatcgtcggtccagaaccagtgattgaacgtttatccgacataaaaatgcaaacagattacggctccagttcgttatctcagagagtagcggcagagtggtttacatccggtgaataccagcaacatctagaacaggtgagaagtcaattaaaggtgagaaggcaattggtcatgagtctcttagaaaccaatttgaagaatgtcgctgcatggaatatgccgaagggaggattctttgtctgggtaaaaatattgcctttactatctatgaaattactttatacaaaagctttgacaaaagggatacttctcaatctcggcagtatctatgctcaagaaaaagggaattatattcgcttatcatatgcttatgcatctcttgaagaccttcaaaagggaatttatgaattgggtttgatgattaaggaattggcaagcagataaatataatgattactaaaagacagggacatgctatcaatgacaagaatctgcttgttttcgcgtttcgcttaattcaaatgcttcttttcccctcatgaaaaccagtaaaaaagccgccaacaaagcggcttttcttaagttaagatgccgaatgtcaaaaaaatgttaatttctgctctccttgtttttattcaaacttcaatctgtatggctatgtctctcctagaagaacagcggcttggttcttgaagagtaaatcatttacagaaattcttatatctacagatgaagaatagcgctttttctattatttagatcattgggccgtataaccgccgtccattacgactgcctgccctgtaacccctttcgctttgtcactggcgaggaatactgcgtaatcagcgatttcttgcacggctaacaaacgtttttgaggaaccaaggggtaaatgacttcttcaaacaccttttctttagaaatgcctctagtctctgcaatatcttttaactggttttgcaccaatggagtgtcgatatatcccggacacaaggcgttgacggtaattccgtattccgctccttccaatgctgatactttagttaaaccgatcaaaccgtgtttagcgctgcaataagctgctttccctgcaaaaccaattaaaccatttatggaagccatattgatgatgcggccaaatttttgttttttcatcaaagggaatactctttttgtcgcactaaaaggagcagtaagcattaatttcagcataaattcaaacttatcagtcgggaagttttctatatccgacacatgctgaatccccgcattgtttaccagaatatccaatcgtccaaaggtttcaagtgtcttagagacacttttttctacttgttcttcgtttgttacatcacaaaccgcagagaggacttcgtatccttgttccgtaagttcctcagctgcatgttgcacggctttttcgttcaaatcggaaatcacaacttttgcgccttctttagcgaattcacgtgcaatttctaaaccaattccactcgccgcgcctgtaacaagagcaactttactttccaataatttactcatagtaacccctccaggattcattttggtctcctaaaagtttacacccagcagttgtataagtaaaatgaataaaaagaatataatgtattcgttaaacttatggaatggagatcatacgatggatatacgccaaatcacttactttcttgaagttgctaaatccaacagttttactaaggcatcagaaaatctgcatttgtcacagcctgccttaagtaagatggtgaaaagtttggaagaggaattaaaggttgagctcattgatcgatcagctagacaaatcgctttgacagatgcaggcgaaattgtatttgagcaaggccaaatgattatgaagtcaatagatgacttgtcgacgaacttatacgatctcttacatttaaaaaaaggaaaagtgaaaattggaataccgccgcttatcggtgtcttgttttttcctaaaatcattagaggatttaaacaattgtatcctgatgtgagcatcaagctgatagaacatgggggaaacaaggtgaaacaggaggttgaagatggggtactggatcttggcgtggttattgaaccagtggacgaagagcagtttgatatcattccattgcttaatgaagaactgatgctcttcgttcattccgctcacccgcttgttcataaagagattgtggaaatgcaagacttgaaaaatgaacctttcatcctgtttagtgaagacttttctctccacgatcggattattcaagagtgcattagagctggtttccggccgaatgttgtttatgaaagttctcaatgggattttatcagcgaaatgattggagaagaactagggatttccattttccctcagtctatagtgaaaaagactgatcaaagtttagttaaagcaatttccattgtcaatccatcaattccttggaaagtggcgattattttaaaaaaaggcaaatatgtttcatacgcagtacgcgaatttatccggtatatttcaactttttgtaagagtaattacgcagataaagaataactcatgaaaaaaatgaatgatttttatagtttttatgtattttacggttagagagggctgcgatatattatcttatatcagaaaatcagtacctttcaggaggaaattcaaatggatcaaaaccgttaccaacaaggattagacaaattaatggagtacactttaacaagcgatgataaaatctctacgcatttaaagatttcagaagacttgaaagatatcgctccggatgtaagtaagtacattatagaatttgcttatggagatatatattcacgaccgggattaaccaaccaacagcgtgcccttgtcaccatctcatcccttgtcacgcagggaaccgaaccgcagcttgaacttcatatcaatacagggcttacatccggattaacaccgactgagattgtagagagtatcacccaattggttccttatacaggattcccgcgtgtacttaatgctctttcagtggctaagaaagtgtttgcacaacgacatgtagaaaaccattgagaaataaagagcttggggaatgcgggatgaattagtataaactcatcaatagaatatacacaaaacgacagcctataaggctgttttttaatagtctcgcttatcataaaaaaagtctgtgccaggcctatatatggtctcttttttattttcggttgatcatatgtaaaagcgattattttaatcgctttttgatacttcaaaacatgctaagctttgacctctttatcagtaagcacttttaaagcatctctcacttttaaggcgaagttgacaggtttatcaatcgattcgaaatgaatatacatcagtctcggtttatcaaacagccagtgattgtgaagtgacgttacagtcagatcatgtttccgaaggacgctgataaatggattgatttctttttgcagaatgacagtttctccgctgcaaagagcacggccgtcttttgtcattgattcaaatgaaaacatttgcggaatgagcaagaatgatcttccgggccgtccaagtactacaggttttatattcgttcgtgatctcattactgtacaaattccattttcaaacgtatgcatggttccgcctagaatatcgttgaactcgtcacaaagaccatgccgttcaatcatttccccgtcagtttttggtaccgcacgcacagttttagtagttagaaccctcagggcctctctcacttttcttgcaaaattgagaggtttatcaattgattcaaaatgcataaacatcaggcgcggtttatcaaacagccaatggttatgaacggcagttacgatgataccgaatttgcgcagctcactcattaacgggttcacttcttcttgcagtaaaacagtctcacctaaacataaagctctgccttcccgatccatgctttcaaatgaaaaggcctgaggaataaaaggaaatgcctcggctcttcttccgagtaccaccggatgaatgttgcttcgaaatcttgtcgccgtacatacgccgtttacgacactgggcgttgaattgagaattctagcaaattctttgcagagccgtgatggctccatactcgtttcttccacttcatatctcctcctggaatctatttataacgtacgtagtattaaagatatgtgaagatagaaaaaatgtaacgcgtcagcagtccatattagagagaatcagtctttcttgtataatttgagattttcttccctttttacaatctctttaactgttaatttttaatagattaaaagcttaaattggtagttttattccagctttgatttttttgtggcggtcatttgtgacaagcaccggctgagcacacataccttttagttgtgagtttcagaatatgaaaaaaagcctttatacaaggctttcggtaaataattcatacagccgtttggctgctcattcagtgacagctcacagctcttttgtcatcaagacatgcgggatgccgtcttccataaattccggtgaatctgtctgatagcccagtttgtgataaaagccttccgcatgtgtttgtccatgcagtttacattgggtgatgcctttttcttttaccatgttttctaattcgcttatgatgactttgcccaacccgtatttgcggtaaggcttcaggatgcagattcgttcgagcttgcctgtatggtttacaatgcggacgcgtcctgtgccggcaggctgattttcatgataaaccaagacatgcccgcactgatcctgaagcgtatcgaactgatcaaattcatcggattcaggtacttgctgttcctcaatgaatactgcttttctaatctcaagcgctgcttgcaaatcaatttccgttgttattctttttatcttcataatcaaccaatccttttcacatgttagtctggactgcacggcttgcttgtggtcttatagaagtaacgataaaataattatattgcaaatgcaacaaaaatatgaggggtttgaaaagatatgactgatattttgcgggaaatcggcatgatcgcacgggcactggattccatcagcaatattgaatttaaggaattagacttaacaaaagggcagtatctctatcttgtgcgtatatgtgaaaacccgggagtgatacaggaaaaagtggcggaaatgattaaagttgaccgaacaacagcggcgagagcaatcaaaaaattggaaatacaagggtttattgaaaagcgtcctgatgatcaaaataaaaaaataaaaaaactgtttccgactgaaaaagggagaaaggtttatccgttattgcaaagagaaggagagcattctgcggaggtagccctgtccggctttacatctgaggaaaaagaaaccattttcagccttcttcagcgggtgagaaaaaatatagaacatgattgggaatttgtgaagaaggggaataaaagagattattaatggtcattaattccttttagtgaatgattgcgttgtgaatgattaaagtcataaatggatacgttatctgtgacatctccttcctcggttcctgcttcaacatagccgataggcttatttttaacgaaaagtatcaattatggtatatttaaataagaaaaaataattgaagcggggaatgatatgagtacaatcgaaaaacaaagacgtaagaaattcagagcgaaatcaatcgtacgggccatcatggtcatcatcggcggaattattgccgcgtatggactggaaaccgtattgattccgaatagtgtatctgacggcggtgtgaccggactcagcattgtcggttcacagctgtttcatttgcctcttgggatcttaattgcggtgatcaatataccgtttgtctggttaggatataagcaaatcgggaaaggttttgcgtttctatcaattatcggtattgtctcacttgccgcgggcacgagttttttccaccacacaccggctatcattgagggagataccctgttaatcaccgttgtcggcgggattattctcggcttgggaatgggattggcattgcgcaacggcggcgccttagatggaattgatatgctggctgtgcttctgtcacggaaattgccgtttggcacgagcgacctcattttatttttaaacatgtttgtgtttatttttgtttcttttgtattcgggctgcaaggcgcattgctttccgtcattgcttactacattgcatctaaggtgatccatgtggttgaggaaggcttaagcggttctaaaacttttcagattatcaccaatgagcctgcattaatggtagagaccattcgtgaagaattgggccggagcgctacttataaagaagcatacggcggtttttctcatgaaaaattccaagaaatcacatgtgtcatcaaccgtttggaagaaaccaaactgaaagaaattattaatgacattgataaacaagcctttgtgacggtatatgatgtcgcagaagtaaaaggcagtaatttcagaaaagtccataatcattaagaagcgagctgccgttaatcggcagcttttttaaaaaaggagaaaaaacttgcaaaaatagaatgacggctgtatattattgatatatcaaacattgactagtcaattaattgcgcaaaagaaagtggggatgggttttgacagcatgttgttcagaggaaggcgagattttatatcagctccaatcactgcataaagtgatcggcacgaagtttgaagcgtgcaccggaatcagccaatcccgccttgagcttctcgccgtgcttttttacgtcgacgagatcagccaaagcgatcttcagaaaaaggtgaatattgatggtgcagccgtgacaagacacttgaaacagcttgaagccaaagaaatggtcacaagaaggcggaagcccgaggacaaccgaattatacttgtccggcttactgaacaggggcgggagagaatcgaggcttccaaaaaggagaaggagcgtttcataaaggaaatgcttgccggtgtcagcgcggaagaacgcagtatgttaaaaaacgtattgtcacagatgcagaataatatagaaaatatgaaagcataggagtgttttacacatgaaaacagaactgaaaacaaacgactttatggacattatgaaaggccgccgttccattcggaattacgatccggctgttaaaatcagcaaagaagaaatgactcaaatcctggaagaagcaacgacagcaccgtcttcagtcaacgcgcagccgtggcgttttctcgtcattgacagccctgaaggaaaagaaaaactcgcgccgcttgccagctttaaccaaacacaagtcagcacatcatctgcggtgatcgcggttttcgcagatatgaacagtgatgactatttagaagaaatttattcaaaagcggtcgaactgggctacatgccgcaggaagtaaaagacagacaaatcactgcgttgacggcgcattttgaaaaactgccggagcaagtgaaccgtgaaacgattctgattgacggaggactcgtttccatgcagctgatgcttacggcgcgcgcgcacggctatgacacaaacccgatcggcggctacgataaagaaaagattgccgaggttttcggaatggataaagagcgttatgtaccggtcatgctgctatcaatcggaaaagcggcagacgaaggatatgcttcctaccgtcttcctatcgaaacaatcgcacaatggaaataaggttgaagtgaagctgaggggagagggacagtggagattattgcagctgttttcgtcggagttgtagctttagaacatgtatttatcatgatacttgaaatgttttttatcaattcgaaggcagctaagcggtccttcaaattgccgaagcatttagaaggtgatcggaatgtagcggtcatgtttgcaaatcagggtctgtataatggatttctggctgccggcctcatttgggggctgatcctcggagctgatccgattggccatatgattcaattatttttcgttatttgtgtggtcatcgcggcctttttcggaggctttacttcaaacaaatcaattatcgtaaaacaaggacttccggctgttttagcgcttatttttcttttattggcgtagcagacggaaagagggcttccggaaaggaagccctctttttttattctgttttgaaaatcattccttaggcggatcttttttgaattacagataaatgcttaccgcagaatagatgagcagcagacacatcacgatgcgaaacgctttatcgtgtttctcaaagagatgtttaaaaacagagccgaacgccgaccacagcagtaaagccgcccagcccaggagaatagccgacgcgagccagaacgcaatcaatggatacgtgtgctgaaatggcaatataaaagcgctcattaaggttaaaaagaataaaatactctttatattgatcatttgaaacagaaatcccgatagaaaagacgatcgggttttttcagaatcgccttttgatgttttgggcagcgagatctgccaagccaaatagagcaaatagacggctccggcaattttaaagtaaggttccacgacgggaatccaatgataaacactcatggtaaacagaccgctgagaatgccgagcactgcaaatcccgtcaggatgccgccgttaaaacgccatgaaccgataaagccggctctgcgcgcttcattcatcattaaaatattgctcggcccgggcgtaatagatgtcatcaggacataagaaagaaaagctatgatactcattaaatcaccttcatttgctaatgtgatggaaccgttttttattgtatgataagaatagttataaataaaattgaaaaataaaatcgcattattgattttttcgatacatcttagaggtgaattcatatggagatcagacatcttattacatttcaggccattgtagataagggaagctatacaggggccgcggcgaagctgggatatacgcagtcgacgattacgactcatattcaggcgcttgaacaggagatcggcggcgcattatttacgtacgaaaaaaggcgtctgaaactgacgcctttagggagagagctgataccgttagccgaggatttactttccgcccatgacaagatcaaaaatatgcaaagcattcacgaggtgaagggcgttttaaaaattgcggcgccggagtctttgaccatttccagactggggccgattatcagagaatattccatgaagtatccgaacgtcaatatcatattgagcaacggaacatgcgggcagaatcaggtggaattagtaagtggccgcgtggatatcgcatttatggtgtatccggagatacaaatggaaaaatgcatacatcattctttattggaggaacgcatcgtcctcgtggcgggcagtgacgcaccggaacattttgacgactatcaacaaagcggcaagcacttttttattacaaatgaagaaggatgcagctatcggactatgtttgaacgatttctcgtcaagcatgatatcagtcatttacaaacaatggaattgtggagtatagaagcaattaagcagacggtgatgagcggactcggtttctccgttttaccttatattacggtaaaagaagaggtaaaagcggggaagctgaaaattcttcagcagtctgagccgttcgagcggctttattctcatatgctggtcaaaaagaaaaaatggcagcttccggccgctgaagcttttgtgtcgcttgttcttgagatgataggttaatttgaaagccgatgcctgcgcgcatcggcttttgtttttgtccggaatcttaatgacattttcgatgtcagccagctttgactccatacctaccttttttaaaaaaagagagctgatcagcaaatatggtatgatttacataatcagggagtgagaagatgaatatgaagagagcgtattatgctattttatacagccagaccgctatcaacttggggttctcactttatacgatggccgtcatcttgtttttgtttacaaaaaccggttcgacggcgatggcctctcttatgacgctcgtcagcattgtatgtcgcgtattgggcagcgccgttttgccgctggtcaccggccggttcacgcttcgttctttgttaatcagttctcaattgatacagatcacactgttagtctgtttgttttttgtcatccaaaccggttcatccgcattcttttttctgctgttttgtctgatcggaggcatttctttttgcaacggatggtttgctccgataaaaagcgcgctgattggggaaatcattcctcctgatcgaagggcgaaagcgaacggtttattatcggcggcggatcagaccgttcagtttgcggggtggtctctgggcggcgtcatcatagcgttcctgggagagagcgatacaatgatcgtcactgtcatgttattggtttcttcggtgttgggcatcattctgtttcttcaagtacgcatgtgtgcgccggcagcagtcagggaacgttccctttttgcagatgcggcaagcggctgggtgtatttatttcagcaaaaacagctcagggttctcattgtgatggatgtgatcgaatcgtgggcaggcatgatatggatcggttctgtgtccttgacttatgtgcatgacgtccttcataaaggagaggcttggtgggggtatgtcaacggagtctattatgcagggacgatgatcggcggactgatcatctataagttatccggtaagtttcagcatcatctcattccgcttatgctgacgggagccttggcatatggaatgttcacgtttatttatgggttgatcacaagcgccgttactgccctttttctggtgctgtgtatggggccggcttgtgtattacgagatctcacgcaggaaacattccttcaaaacatcacgaccgaaaagacacgggtcaatatattagcggcgagatcagctttagttcagttcatttttatgttttccattatcggaacgggggttatctcggatgtattcggcgtgcggtttatttatattggcgcaggcctcctcttattaatttcggcttttatcggattttctcagctgcgaatgaagaagatggtacaaagtcgcatgtagtgtagtataatgaggaacgtacgttctatatcgagagaggagagggtaatgtgggacatctggcactgcaattgtatgattatcatctttgggcaaatcagcaaatattcacccggcttaaagagcttccggaggatgtgtatcgtaaggagattcaaagtgtctttccgtcgatagccggtgtattgactcatgtgtatctgtcggataaggggtggtttgatgtgttctccggagagcgtctggaggatacgctgaaatcagctgaacagcaaaaagaggacatcttgtctaaagagatagaagagctggaagatatgttctcggaattatcagaccggtatcaattatttttgcaaaaggaagaaaatatcagtctccctcttgaaatagagcatccgtcaggtgacatcatgaaaaccgcagcggccgatatgatcctccatgttgtgaaccacggaacgtatcatcgcgggaatataacagccatgctcagacagatggggtatgcttctgtgccgacggattacggtatgtatttatatataaacaataagtaaacaagacagccaacgcggctgtcttgtgatatccgtaaaaaagccaaatcatatgagtgatttggctttttcatttgctatgccatgttctgcagccgttctaaactgtttttccaattcgcttcaagcgctgtaaaagcagcggcggcatcttgctgttctaatgcgtgaatgatatcagagtgttcattatatgatctgtttaaagcgccgttttcactgaaatagcggatttccagtctctgaattttgactttcaggcttactagcaatttgtgaagttcagcgttgtccgcaagtagaatgatgcgatggtgaaatgcattgtccgcttccaggatggccagtttatcgccgtctttcattgtttgaagaagattttcattcagctgtttcaattcctgaatcacggcatcgtccacatgcgggagagcttgctgcaatgcgagtttttcaagcgtccagacgatggaatacaagttttccgcttcttttaactcaatcggagcgacaagcgtccatctgttcgcttttgttatcaccaagccgtcatcttccagccgcaataaggcttcccgtatcggggtgcggctgattcccaatgtttccgacaaatccttgtcctttaactttgtttccggtttgagcttgcccgttatgatccagtttctgagtgtgcgatacacttcgtcccgcatgatggttcttttcagcacaggttctttgttttgattatccaatggaacacctcatgaatcgtagtatacatatttgcattttaccacagtccgggcgctggttagaaatgaagagggacgtctaagaatgaatcgaaccgagatgcttcatctcaatatgctgaaagtcagcggagccgccttcagaaaagagcgtgattccctgatcttcgtgttttgggaacacttcatttgtcaaaacggtttttccgtcgtctgcaaatacttcaatacttgttttatccacgagaattttcagatggacgcgccctttgtttccgtcaaatggggctttgctttcggcgtatgcgccggttttatcaggctggtctgtaaacgatctgttcacataggcatagccgtcttctgccgaaataccgacatcaatatgccgactttggtctgctgattctctgagtctgacgcctgcatttttgatatctgaccaagcgatatccatatcaagctgatatgtatcacctttgatcggcagtgtctctgaaccgttcacctgtttgtgttctatgctgtcagttgaagaggttaattggttcaatgcttcaaccggctctgacacaaggctgtatgtgccgccgtcctgctgctgaaggcggatttcacggacgatagaatccgtaccgttaaagccgttttttagtgtcggtgtttcattcggataatcccaattgttcatccatgccagcgcatagcgttttgtcagcggatcttcgctattaccgtcctcaaatgtgacgccgccgtaccagtcaaagccgtaatcgagccattgcggttcttcttgatcggcggaaaattccttcccgtcaaagtttccggtccaatacgcgtacgtattcggtttgcctgcgggtttgccgtttgcgcttgcgcccagaacccacttggctgttccgtcatctgcacgcatcatataaaggtcggggcattcgacgaggccgatctgctgagtgataaaaccgcccgtgtatgtccaattttttaaatcgggtgattcataaaaaccgattttttcgccttcggccatggccatcacccatttgtcatcctgttcatcccagatcactttcgggtcccggaaatccttagttcccggatttttcatcacgggctgatcactataggaagtaaacgtttttcctttgtccgtgctgtaccataaatattgttcctgggcttttgttttggctgtcggctgcgttgtgacggcgaccagcgcgtttttgccgaagcccgcggtgttgtgtttatcaatgacgacagaaccggaccatatatcgccgttttcgttggtgtatttcggaatagccgtgccttcgtccgtccagtgcaccaagtcctctgatacggcgtgccgccattctgtgccgttgccgttcgggtaatcccgattataaagatagtagtaatgatatttcccctcgaaaaaaatgggcttttgagggtcgtttttccatttgtccggggtcgtaaaatgatacgccgcacggtaatctttcttatgctccgtgtttgtgtcagaggaattgtggcttttgttcggcagtaagccgacaaacaggaacgcacccaaaaagatcaatattacaacgggccattttcgtgccatgattgagttcaccatcttgttgagaaataaaagaaaatgccaatgaagtatcggcattttctttttgttgttattagttgttaaccgtaagctgtccttgttcaaggatgctgtttttaacaacggatgttttcttgcctttgatgttcattaagaagcttggcgcaaatgttgcctttttatcctcaaagaagcctctgtttgtcatgtagcttgtgatcacgacattgttgcctttggcttgcggcactgcgaagtgagagtaagtgaacgttacatcgttaggatcaagacccatttgcagtacaagaccagttttgttcagcggcttgtaaggacctgttaaagagtttgatacataaccaagcatgtagatatcgttggagttaataccgtcgatcgtcatttttgaaccgcgtgaatcagtgaacagataccatttgccgttcattttgaaaacattcgcgcgctcgatttcatcagttaccgtgtttgaagtgatcagcggcttcatgacttttttcaatgtgtagtcattgtttaattctacgatgccgagggcgccgttcgctaattcagcatcgcgttttttagcactttgctgaagcttctgactttctttacggaagaagtttgtgctgccgccgtagtacgctttgttaaacaaagattcttcgccttggtatccgttatctgttcccgtgttggcttcgaatacaaggtatttatggcctttgtcttcaacgtagtgagggtctctcagcgtatggttgtcgccggatgtatagttcccttcatcgataaactgctgaacgttttgatatgtttttccgtcaccgtcaaaaatcgttttatgatcttccactccgttgatcttgagcgtgtcatcagattttgacacatttacctgcgccgttgtcaggctttgtttgccgtaatgtttaccggaaaagtcagtgtagaataaacggattttcccgtcagatgtaaaggttgcagaaccggaccattcttgtgtctgttctttcaggatttcatcgttggcgtcgaacttatcgctgtctttaaagacacggccagcgtttttccagctgtcgatcgagttgtcgccgactttttgataaaacatgtagatggatgtgtcatcagcgtctttcgggcttccggcaagagcaaacacgacgtgatagccgttgtattcagctactgttccgtcagcgttttggagcggccagctgtcccacacatccagtccttttgcggactcgatatttttaattgttgattggtcgaattgaggcacttggtatttttcactttgctgctgtttagggatctgcagcatatcatggcgtgtgatgtgagagacgccgtacgtttctttgtaaggtttttgggtattttctttcgcgaaggcttgagtcgctccccctgccagaagtgcagtcgtaaaagttagaactgtggctcgttttgcaaattttttgatgttcatgttcatgtctccttttgtatgtacctttttttgcgatctaccgattcgctcctcctgcattcatggatggcaggtttgttacagaaaaaaagacctaaaatatgtatggggtgacgccaaagaattcactttgcccttaacacattttaggtcttgcctgctttatcagtaacaatcctgcatgatttacttgtcgacatcattctattagactctgattctattgacaactggtctattttcctcttttggatgatagtaaaatgaaaaaaggccttttaatatatgggtaattgagactaaggggtgctctgggcctaggaaaaaacctctctgaaaaagagaggttattttttcttgatagataataaagcgatggtagctaaaatcagcaaagtacccagccattctgatattccgaagggaacatgcagccagatcacagctaaaaaagctgccgacagcggctctgcacaagcgagcaggctggtttcagaggcactcagatatttcaggctttccaagtagcaataaaaagcgatgagcgttccgaaaatgatgataaacacgatcgcggcatatgcaggaaaggaccactcgccttcaaatttccagggcgggcggatcaagctgagggcggctccgccgatcagcatgccccatccgacaataatggcagatccccatttcttcagcagacgatgcggctgaagggtgtaaaacgccagtgcaaacgccgaactgatgccccaaaagacggccagaccggatacggacaggcttccgacattcccgtgcgtgaccaaaatgaatgtgccggcaaccgccaataagacggcgagcagctcttttcctgaaggaattctctttgcgcgaatcgctaaaaagcatgtaatgatcgctggccctaaatactgaagaacggtagcagttgccgcgttgccgtactcaattgccgcgaagtaggtgtattgaacgcctaacattccgaaaatcccgaataaaagaaggggaattctgtcccgtctgtctttccaaacagcccatatccgtcctttttctttgcggtacgcgatgccgagcagaagcgcccctgacaccagaaggcgcaccgaagtcagccattctgtattaaaatggcggtgctggaacagatactgggcaaccgttcccgagaccccccataagatagctcctgtaagcacaagccaaatgcctgttgttcgtgaataagaaagagcagcgtgtttttccaggatagacacccccgattctgatgttctgatattaacttacaataattaggaaaacgaactccttacatgtgatatattatatattgtatattaaattccgtcaaaaagattttcggagaaagctcttacaaaacggccgtctgaggaatgagctgtaaaaaaaaacaccccggcgggttgggactgacccccgtttttgagacagggatcaaaacacctttaagcagccagctgtcggtatgtgaccggcggctggttgtttagtttcgtttgaatacgaatgttgttataatagtgtatataggtttcgacagtttgttctacgatggtcgtcgtagtgctttccaacctgtcgaggtagaacgtttcagactttagtgaggaatgaaacgattcaatggaggcattatcagcgggcgtccctttgcgggacatgctcatggtaatgccttttgttttaacagctttctgatactcataagatgtataaacagaaccttggtcactatgtaacacacagttctctggcagtgcgggcagctgatcaagtgtgtgtaagacaaagtctgtgtcctgtctatcgccaatcgtaaaagcaatcacttctccattgtataaatccaatatactggaaagatacaattgtttctgcccataaggcaaatatgtgatatccgttactagcttttccagagggcgatcagactgaaagttccgatccaatatattctcggccacggcatatggctgcccattcttcttgcgctttttcaccttaacccggcattgccactgattcttctgcataatgcgctgaaccgttttatgattcatacgcattcccttttttaatatggctgtgattttccgatagccatatcgatacttgtgttctcggcacaacgtgccgatttgtttttctaaatggtatttagggttatctttcatcagattcttcttccaacgataataagatgctcgtgagatacctaaatgaatacagatatcctttatggtcattgtgctgcgcaatgcttctacaagctcgactggcgtttcgctatcagcttcctttccaattcgttgtacttttttaacacttcattctgttgtctcagataacaattttctgcctgcagtttctctaattcggaagaatactctggaccttttccataagaatattgctttccgacaggttgttcgaatcgatgtgtgtccccagctttataccacctgacccatgtctgcacctgcgtcttattctttatattcaattcctgcatgatctccttcacaggcacgcccgccaatctcatttctacagccttctgtttgacttcaaccggataactcactcttgccctcatagaaaaacacctccaagtctaatttcggataacaacgatccgttttcaaacttgaaggtgttttttgtttgtctcatattatggggtcagtcccggtttccggggtgttttggttattctgcaatcgcgtctgttaaaacaggaacgacttgtttctttctggatacgacgccttttaaaagagccgtgttgttttctaaagtcacgttgaatgctttttccacttttgacgcttgatcaccgatggcaagcgcaagggaatcgttttccagaatatccgtaatcacgagaaggaacaggtcaaggttcttctcagcaattacttttgaaagagccgcttctaattccggctgacgctttttaacatcttcaatatcaactgtgttgacttgggcgatttcgacttttttgctgccgagcgtgaactctttcgcatcaagagaaatcagttcttccacagtttttttgcttaagtcggcgcccgctttcagcatgtttaagccgtactcttccgcatctacgccggcaatttcagcaagctcttttgccgctgcgatatcttgctccgtgcaagtcggagatttaaataacagagagtcggaaatgattgctgacagcatgaggcccgcaatttctttctcgattttcacgttattttctttgtacattttgtttaagatcgtagccgtacagccgaccggctcagcacggtagtaaagaggttccgctgtttcgaagttggcgatacggtggtggtcgataacttcaagaacctgaacgtcttcgatatccttgatgctttgctggcgttcattgtggtcaacaaggatgacgccgtttacttcgtttgcggctgtttccaccaaacgcgggctttcctgcttgaaataatcaagcgcgtattgtgtttcgccgttgacttgtccaaggcggacgggctcagcattgaagccgagtttattttttagatcagcgtaggcaatggcagagcaaatggtatctgtgtctgggttttgatgtccgaaaataagaattttttccataataactccttgtccttttttgtagtgtaaacaatctttttatagtttaacacgtcttgaggagggtgtaatcttcaaaaccttaaaaattgatgtgaaaaagaagcatttttgttgagaggtggagaggattgcgagtaaaatactgggtaagtcagatgctaatcagcatatagtatcaaaaaaggtactatggaggatgaaaaatgaacatatatccgaataaagaaggttgtccggttgaactgacgctttccgttatcggcggaaagtggaagggtattttgttttatcatatgatcggcggaaaaaagcggtttaatgagtttcggcgcatttgccccagcattacgcagcgtatgctgacgcttcagcttcgcgagcttgaggcggacggcatcgtgcatcgcgaggtatatcagcaggtgcctccaaaggtggagtattctcttaccgaattcggcaggtcgctggaaccgatcgttttgcaaatgaagaaatggggagatgccaaccgggagtttctcgagacataccgggaaaaaacgtctcctcaagatcagtccgctcaaaaataagaagcagcaaaggattaaattccttgctgctttttttttatttcatcgcgatggcctttctggcgttgcgcacgtcatttttcagcaattcgctcaggttgtaagccggatattgaccgcgttcttccatatactcaaagaccatttgatgccacttgatggccgcatttaagtgcttgacgaagacgtgtcttaattgaggtgtggccgtctctgtaatggctccggcataattgcggacagatgttttggccagaatgagcaggccgccgctgtaaaaggaggaatcagcgcgctcttctgtttcatcctcacgaaaagcgggagcttcagggaagaaaggaagcagttcacgcagattttgttccagcgaatggatggaaaatctgtaaagctgttttaatctggcgtcgcttacgtcccgctctgttctttttaatttcacaagtccgtttgcctggaaagccactaactcatgcagttctaacgtttcatgccatgctaatgttctccgctcagtcatggtgtaagaatctcctttatccttcattttcactatcagcatatgccccggttccgatgttgttcctgatgttttgaagtttccagaaagggaaaatcaatgtaaaggaaatacgaaatagaggtgaaactatatgtgggacatgataaagaactttttccttttcagcagcggggttttgcaggcgaccactctcttacttatcgttatcgtcttgttatatgtacgaaaaactaaaaagaaaaacagagatacttctggtttcatggatgatcaggatcactgatacaacgggcattctttcactgggatgtccgtttgtctgttttcatgtttcacatggaacattggggctgtccgcgctcattttacttgcgatttcgacttatgttaaaatatatacgtgtattttggagagtttatggaaaattcaggtcttgaaagagacattgcggcgtcaaaagagcagtcgtctaagctgctcttttctattcgtatgttcgaatgatacaaggtttgaggtgagtaagtgaaaaatacaagggctctaatagaaggcgccattttgatcagtatttttgcaatcatttcccttttggtcgtgtacctccctttactgggggcaattcttctctttgctttgccgctgccgatcattctttacaccattcggcacggtctgaagcccggggtatggatggggcttgccagccttcctgtcagctttattgtaagttcgtttaccgggcttacaggcgcttttacggcggcctgtacgggaatcgccatgggatattattttaaaaagaaacagcccggctatgcggttgctgccggcgctatggcgtatgtgctgtgcggcgtcgttttttttgtggtcagcatcgtgttccttaacatgaatgtggttgataccaccatgtcccagcttcgggagtcgctgtctgtggctgataccatgtcaaaacagctgggttacggagaccagttcgggaagcagatcaagctgatggaaagtcagctgagcacggttcaatatctttttccgacagtgctcgtattgaccggcatcgttttttctttcctcagttatgctatggcaaggccgcttttacggcgattttcccctgatcttccgaagatgaagccttttagagagctcaaactcccgcaaagcgttgtcattctgtattttattgtgacgatattagggtttctgcctttagaaaaagggcatatgctgtattcggtttcattgaatgggggatttattctcagcttgctgatttgtattcaaggattagcgtttatttttttctattgccgcgaaatggagatgccgaaagccgttcctgtattagcaattgtgctgggggtgctttttccgctcatcttgtccgtgtatctcctcttaggcatcattgacataggctttaacataagaaataaggtgacgcgaaattgagtgtgacttacaggtggggagttgatagaaatgcctagtttttatgaaaaaccgttgtttcggtatcccatctatgcattgattgcattgtcaatcatcataattctcatcagcatttactttaactggctgataggagccatcggcgttgtgctgctcgccgtgatcttgtttttcattaagcgtgcggattctctgatcagaaaagaaattgacgattatatctccacgttatcgtatagattgaaaaaagtaggcgaagaggcattaatggaaatgcctatcgggattatgctgtttaatgatcaatattacattgagtgggcgaatccgtttttgtcttcctgttttaatgaaagcacgctcgtcggacgctcgctgtatgacacatgcgaggccgtcgtgccgctgatcaagcaggaggtcgattcggaaacgatcaccttgaatgagcggaagtttaaagtagtgattaaaagagatgagcgcctgctttatttctttgatgtgacagaacagattcagattgaaaagcagtacgaaaatgagagaaccgtgctggcatatatcttcttagataactatgatgacgtcacacaggggctggacgaccaaacgagaagcacgatgaacagccaggtcacctcattattaaatgcgtgggcgcaggagtacggcatttttctgaaacggacgtcctcggagcggtttatcgcggtgttaaatgaacacattttaacggagcttgaaaacgcgaaattttcgattttggatgaaatccgagaaaaaacatccgtccacactgtatcattgaccctcagcatcgggatcggcgcatcggtttcttccttgaaggagcttggagatctggcgcagtccagcctcgatttggctctcggccgcggaggcgaccaagtggcgatcaaaatgccgaacggcaaggtgaaattttacggcggcaaaacgaatccgatggagaagcgcacaagggtgcgcgcccgggtgatttctcacgcgctcaaggagattgtctcagaaagcagcaatgtcattatcatggggcacaaatttcctgatatggacgcagtcggagccgcaatcggaatattgaaggtggcgcaggccaacggcaaagaaggctacatcgtcattgatccgaaccagatcggatcaagcgttcagcgtctgattgaagaaattaaaaaatatgaagagctgtggtcgcggttcatcacgccggaagaggcgatggaaatttcaaatgacgacacgctgcttgtcgtcgttgatacacataaaccatcccttgtgatggaagagcgtctcgtgaacaaaatcgagcacatcgttgtgattgaccaccaccgcagaggcgaggaatttattaaagacccgctgctcgtttatatggagccatacgcttcatccaccgcagaactcgtgacggagctgcttgaataccagccgaagcggctcaaagtcaatatgattgaagcgacggccctgttagctggtataatagtggatacaaagagtttttcccttcgcacgggctcgcggacgttcgacgccgcttcttatttgagagcgaaaggcgcagatacggttctggtgcagaaagttctcaaagaatcggtcggttcttatatcaagcgggcgaagctgatccagcatacgtctctttataaagaacatatcgcgattgcttctcttcctgagaacgaagaggagtactttgaccaggtgctgattgcgcaggcggctgattccctcttatcgatgagtgaagtggaagcttcatttgcggtagccagacgggatgagcatacggtgtgcatcagtgcgagatcgctgggcgaggtcaatgtgcagattattatggaggcgctggatggcggagggcatttaaccaatgcggcaacccagttatcgggcatttctgtctcagaagcgctcgtccggctgaaggaagccattgatgaatattttgagggaggcgttcagagatgaaggttattttcttacaagatgtaaaaggtaaaggaaaaaaaggcgaagtgaaaaacgtagcagacggttatgcacataactttctcattaaaaaaggcctcgctgtcgaagcaaatgcgacaaacatcagcgcattgaaaggacagaaagaaaaagagaaaaaagaagcgattgccgagcttgaaagagccaaagatttgaaagaaacgcttgaacagctgactgttgagctgagtgccaaatccggtgaaggcggccgtctattcggatctgtcacaagcaaacagattgcagaagcgctgcaaaaaacgcataagattaaagtggataaacggaaattggagctccaagacggtatccgcacactgggatatacaaacgttcctgtaaagctgcaccctgaagttcaggctgtgctgaaggttcacgtaaaagaagaagcgtaatacacaatgaaaaacccgccgatccggcgggtttttttcatgtcagcagacggcgcagcgcaagaaaatgatgagattgtttcatttccgatcatcactagattgcatattatattacatcataacgaaggatgtgtcggtatgaaacgatttttttctgaaacatattttaataatccggagaataaaaaggcgctggagcactatccgctgatcggtgatggaaaagacggggaagtctatcgcttaacacacaacaaatgcgtaaaatacttctttgaaaaagggacatgcaaaaaggaattggcagctttaaagaccggacaaggttccccggtgattccaagactgtatgaatacggagatcgttatattgtgatggaatatgtccaaggcacctctcttgcccgccatatcaaacaagaaaaatccctgtccgtcaaactgactgctgatattttaaatatgctggatgaattaaaaagaatcggttttaccagatgggatgccgaaatcaggcacattctgatcaacgaacacggaaatcttaaggtcatcgaccataaaagagctttttccgccattacccggtttcccgtaaaactattaaaaggactggacaaatacggcttggcggatgagtttttgaacactataaaaaaattaaatccgtcacgttacctggaatggcagccgcacatgtaagtttctgaaaatccgcacatgtaagtttcctttttgtagggtcgtcatatgatatttgtaacatttgtttggtggagtgtggaaaaaatggcagaatacattatggttatcggcgctcatcccgatgatgaactattgggatcagcgggcaccataaaacggctgatcaatgaaggatataaagtaatttccgttattacggcattaggaagaaaagaagaagctcatcatattaaacaattaggcgaacgcgcgaatcaagagcttggaattgagaaagtcatctttttggagcacacgaatttagagctggaatgtatccctcttcataagcttgtcaaagaattagagcagctcattcgcgtctatcagcctgataaaatctttacacatcattacggcgatatcaatatggaccaccagagaacattccaagcagttttaacagccgccagaccgcttccgaatcaaaagcctatcgaactgcttacgtttgaaacgctatcttcaagcgagtgggagaggaatacggctgataaactcttcaagcctaattacttcgttaacatcacagacacaatggatgccaaactcgcggcgcttcaccactatgacgtagaaatgagggattaccctcatccccgttcatatgaaggcgtaaaacatttaggaaaagtcagagggatgacggcgggtgtggaatacgctgaagcttttgaagtcgtgcggaggatctggaaatgatcaagacattttccgtcccctatccgtatatggtccagacgcttgaccgctactacggggtcaaaacgcgcccgcgaaaaaaggcggcagtaaagacacagttgaaacatgaacatcatattccgcggttatacaggaaaaaaaagaagttatccattttgattgccacgttttgggactacccgcacacgggcggtttatcaaactatattaaaacgcttagtgaaggcctgaaaaagagaggtcataaggtggatgtcatatcccctaatctgtttccgtccgtacaggtaaaagaactgcgggcggctgttgttccgaaattaaaagatttctttaaagacagatatggggtttataacgatcatattttgaaaaataatcggctgatgtttatatacgagcaaatgcttcaaaagattcatttggaaagatatgatgtgttccacgctcaagatttatttacagccaatatgttaggcaggttcaatcaaatctataaaaaacctttatttttcacaccgcatggcatgtttactttcaacagacttaaatttcacatctttaaaaaaggctcggtagaagagatttattataaaaaattagagatgaaagccattgaatacgcagatcgcctgattattatcagcgatacgttccgcagcccgctcatgaagctcggagccgaacaggaagacatgacaacggtggtcacaggaatcgattacgatgcaaaaacaggcgggaaaagaaaaaccccgttaccgaaaaataagatcatcatctcgtgtattgccagattaggcccgagaaaaggtcacaaatatttactggacgcactttcgagaattccatctgatgtacttgagcatgttgaagtgctgatcgcgggcgacggagagatgaggagcgccttagaggaacaggctcgaaaactgaatctatctatggtttcctttttaggaaaaagagatgatgttcccgctattttgaatgtgacggacatattcgtactgccgaccattaatgatagtctgcctatttcgattattgaagcgatgttcagcggctcggctatcatcgcgaccgattgcgggggtattccggatctgatccgccataacaaaacggggcttattgtcgagccgggaaatgcaaaggttcttgcccgggctttagcgttttttatcactaacaaatctgcgcggaagatagctgcttcaaacgcaaaggcctacgcagagaaatatttaagcagtgagacgatgataaaaaatatcgaatcgatttatcaaaataccaacagctcggagggagatcatgaaacatgaacatgcggccgttgtacttgatttcagtgcaaacgggatcgggatgattcgaagcctggcccgaagaggaatcgatgtttacgcgtttgacacggagggaccttatcgtatcggaaaatcaagattggcagattgcgggatatgtcccagccctttaacacaagaggaagaactgctgacatttctgactgatttcgggaagcgatttcaagtaaaaccggttctgtacgcaggatctgatgattatgcgggattcatatccaaattccgcgaaacattagccgatttttttttatttttgctcccgagccgctctctgttagaaacggttttagataaaagcaaagcatatgaattagcggtcaagcatcacatcccctgcccgaaaaccttttttccgaacaaccaggatgagctggaagaggccatcgccaatattgacttcccgtgtattttaaaaccggtggccggccatgaatacagaaaaaaagtaaacaaaaaagcaattgtaatgaaggatgccgcacaattgcgcaaggagttcagctcctacagagaaaatggagaactgctcgtgcaggagatcatccccggagacaaccagtgtttttataaagtcgccactttttatgatgaccaaatgaaattaatgggcttattctctctgcaaaagaaccatcaattccctgcagattttggcgcgggggcccacgtcgtcagcaaacggcttcctgatttaatcgagaagaccctgccgttttttgaagcgattcagctgaagggagtaggcatggcggaatttaaaaaggatccccgggacaatgtttacaagtttatcgaaattaatccgcgcttttggctcagccatagcctgacagaaccggcaggcgttcatttcgtttacatgtactatctgtatttgaccggacaacatgtgaagccccagctcgaacaaaaagacggaatcaactggatttatgaggtgcgttatttcttaacgtttttgaagaaacgaaaaagaggagaaatgacgttccgggatttttggaaagggtgtaaaggaaaaaaagagtacgctctttttgcttggaatgacccgatgccatttatcagaaacacttggtctcatctcaaaaacagctggaaacggaagcggaaggaagatcggcatgtatgaaaaggatcttttgtatggcgcatttcaaaaactgagaattgacgaaaaactgtcgtattcgttcggtgaaagggctgcggtgaatccggatgacatcacatgcctgaaatcgacggacagaagcgccatttataaactgtttgtaaagaaaaaatccggaactgttccgctgatattgaaggtatataaatcttcccgtgaaaaaaataaggtcgagattaatatatacgggaaagcccattctgttttaggggatttgctgccggatatctatcttatagaagaaagtgaccatgaaacgtggatatttatggagtttgtcagccagatcaggggacagcttacatttcacccgaagcatttcaagtatattattccgtctgtcgcagaattgcacagccgcacctttgaaaacaagaatatttctgacggtaaatggcggtcgtggctgccggtatatggatcggaaaccatgagaaaagggcgtaaaaagcagatcaaaaagacagcggaattattggatagggctcttaaagatgagcgcacaaaagatatcgtgaagcctcattatcggcaaatcacaaacttgcttgagcaggaggagccggattttttccctgaattgatacaaaactgcacagccatcacacacggtgatcttcatatgcagaatatctgcacccacgatgcgtccggacatgaaccgtgggatattcaattcatcgattgggaatccgcaaaatacgcgccggtttggtttgatatgacggtgctggttgaaattctgcttggcttcagaaaagattggagccggcacgcagaagatattcggacgtattgcgtaaaagtgtatacgaaagaaatgaaaaagcggggcattcattttcagacccctcctatgacgctttataaaatggcttatttgcagagaacacttgaaaaagggcttcatacccaattgcggagaatcttcgacaatcggggaggagaactgctgccgtatcatgttgacaaagtgtcaaaatggggacgggaattaggattataagtttgagagagggggagcggatttgaaagaagagatcggcaagccgaacggtctggtgcctccagccttattgcgcgtcatggatcaattttacgggatcgaacatcaaagtgagccagagatgctgtattcgttctgtgcggaaggaaaaagctcccctaaacgaaaaaagccattgcgtattctgtacgcaacttttctccgttacccgaatgtcggagggttggcgagttatatcacatcaattaagacgggttttgagcgcatcggtcatcaggcggatgtcatctcgccgctccaaatgccgccatctttttttcaggaagatatcccgcgggccgctgacgagatcagagcgtttcttgttggcagatacggcgccgcaaacgaaaagtttgtgaagaatctcagctatttacatgtctttcaaagatttttgaaggagaaagacttagaacaatatgacctgtttcacgcgcaggatttatttgcggtatttttgctgggataccttaatcaaacgtaccagcgtcctctttttttcacgccgcacggacattttacgaaaagccggatgaagtttcataaaatccaaaagggttcaatagaagaggcatatttcagtgaaatagaaaggcagggtattcgggcttcggataaaatcattacaatcagcgactcctttcacgagcccttgctggagtacggagcgaaggaggcccagctgaagactgttcataccggtattcacattcaggatgcccctgagtcaaaacgtgctgaaaagctcgtgatcgcgtgcgtttcccgtctgaccgagcgaaaaggacatgatgtgatgctggacgctctcgcccgcatccggcaccatttatccggagttgatatatggatcatcggagacggaaacatgagagggtttctggaagagaagagacggaaactgggcctctcaaatgtgtttttcctcggaaaacgacgtgatgtgccggcgcttttggctgaatcatctatatttgtcctgccgacattgaatgataatttccctatagcgatcatcgaagcgatgttctcaggtcaagccattgtcgcaactgactgcggaggaatccctgagatgatccggcatgaggccacagggcttatttgtcagcccggcaacagccgcgaacttgctgatgctctcgtaatgctgattacggatcagtctctcagggaacggcttggaaaagaagcgcgctcctatgccggccggcatctgcgtcaggaactgatggtttcaaaaatagaaagtatttatcaatcatttttctgaatgataccggcgccgcatggcaggtgcttcaagagcaaaataaagaggccggcgtttaactatccagcctctttccgaactattttttcatctcatacagagtctgctgactttgtccgcccgggccgcccgtcattcctttccgggctgagcttgtttttccggtgctgtatgggtcagctgagatttttgtgccgttctttttcctccatgagacaagcttcgtattgcctgaattgtttccggataataagaaatatttcacttttccttcgtcaacaagttttttcagctgtgagacggttaaaatcggatcggttccgttcaaagaatgttttaccaaaattttcttcgcgaaaaaaagaggcggaaagccatcgcttccgcctcccgcacatatatatgagagagcagcctttatttgtgatcgttctcttttgggacttcagctaatttggcaagcagaatgtgctgaggcatgtgcatgattctctcaagcggcatattcagtgattctgcgagcttttgcgccgtttcggcggaaatttgcagcggtttcatgtgatcactccttccgtttctttattgtactaaaatcagaaatctatcgtaagaggatatgacaaaggaatggaggtttgaaaagcggggctttataacagaatgggggaggttttttatgcaatcgccattgatgttattacagctgaagctggctgattatcagaaaaaagccgcagaactgcggacaattgacgaatttattatactgaaacagacattgcaggacatgatgaaagtattcgccgcctgtgaagaatgggagctgtatcaaaaaacggccgatctcatggcgcagacggtgctgcacatccgtttcatcgaataagaaaagccctcgctcgggcgaaggcttttcttaaaaggaccgttcttcttcaatgtttttatgctgatcataaatgacaagcttagacgggctgttctctttagccgtctgctccgctttctcgatcgccgcgtcctttgatgtataaagagctgtcggcgccacattttccaccttcacaaaccatccgtccgcatcaacactgggtgttactgcatatgttttcatccttcttacctcctggtttcgatttatttatttgtttcccggcattcggaatggcgaaacacgcagccgctgtttgacaaatacagggaaagagatgtttttctattctttttcttgagaaatggtaaaatggagtttggatattttttaaggagaggacggtgcttagcatgacagaccttctgaatgatcggctgccgccgcaaaacatagaagctgagcaggccgtgttaggtgctgtttttttacagccgtctgcgttaacactggcttctgaagtgttgattccggatgatttctacagaatgtcacaccaaaaaatttacaatgccatgctcgtgctcggagaccgcggtgaaccggttgatttggtcacggtaacgtcagagcttgcgaataccgatttgttagaagaggtgggaggcgtctcttacctgacggacatcgcgaattccgttccgacagcggctaatatagaatattacgcgaaaatcgttgaggaaaaatccattctccgccgtttaatcagaacggcgacctcaatcgctcaagacgggtatacgcgcgaggatgaagttgaagatttattaagcgatgcggaaaaaacgattatggaggtcgcgcagcgaaaaaattcgggcgccttccaaaatatcaaagacgtgcttgtgcaaacatacgacaacatagagcagcttcacaaccggaaaggcgatattaccgggattccgactggttttattgagcttgaccggatgacggcggggtttcagcggaatgatttgatcattgtcgcggcccgtccgtctgtggggaaaacggcattcgccttaaatattgcgcaaaacgtggccaccaaaacggatgagagcgtcgcgatattcagtcttgagatgggtgccgagcagcttgtcatgcgtatgctctgcgctgaagggaatattaatgcccaaaatctcagaacgggaaatctgacggaagaagattggggcaagctgacgatggcgatgggaagcctgtcaaacagcggtatctttatagatgacacccccggcatccgcgtcagcgaaatccgttcaaaatgccgcagactgaagcaggagaacggattgggcatgattttaattgactacttgcagctcattcagggaagcggccgttcaagcgacaaccgccagcaagaggtatcggaaatttcacgggcgctaaaagcgctggcgcgggagcttgaagtcccggtcatcgccctgtctcagctctcccggggtgttgagcagcggcaggataaacgtccgatgatgtcagatatccgtgagtcgggaagtattgagcaggatgccgacatcgtcgccttcctgtatcgtgatgattactatgataaagaatccgaaaacaaaaacatcatcgaaatcattattgccaaacagcgtaacggcccggtgggcaccgtctcactggcttttgtgaaagaatacaataagttcgtaaacctggaaaggcgctttgatgacggcggtgttccggcaggtgcgtaaagcctcaagcaatgtcttgaggctttttttcatccgaaagaatgagagaatgccgtccgttcggcagacgaaaaaaagaaagcgcttttatataatggcattaagggaggaatgatgatgacaattgaatttccgcaatttcaagcggcgcaaatccggattgcccggccgaccggacagctcaaagaaatcatcaggttttatgaagagggactcgggctgaagagggtcggcagtttttccggacatgagggctacagcggcgtcatgttcggcctgccccatacgcaatatcacttagaattcaccgaagaaaccggcgcgtctcagccggcgcccgttccgcacggcgacagcctgcttgtcttttacatccaggatcagcaggaggtcatccgcatcagcacgaaattaaagcagatgggatatgaggagaaagcacccgaaaacccgtactgggaagaaaaaggcgtgaccatcgaagatcctgacggctggcgggtcgtcctgatgaatacaagtggcatataaatgactgtctgaagaaccctgattacgggttctttttcttgttaaagcatgaaagtttcgggagtaatagatagcaaatgaaagagaaaacgcttttaatcatgtttaaggcgaacaaatatagattgataagatttaaatgttcggatttacgattgactttctgtttcggcactgatacacttaatttgtttgaatgagatatcgttttgaaaggttaacggaggtgcacggatatatgtcttcagtagtcgtagtaggtacgcagtggggcgatgaaggaaaaggtaaaattacagatttcctatcagaaaatgcagaagtgatcgcacgttatcaaggcggaaacaatgcaggacataccatcaagtttgatggcgtcacgtacaagcttcatttaatcccatcaggaattttttataaagaaaaagcgtgtgtcatcgggaacggaatggttgttgatccgaaagcgctcgtaacggagcttgcgtatcttcatgaacgcaatgtgagcacggataacttgagaatcagcaacagagcccacgtcattcttccataccatctgaaactggatgaagtagaggaagaacgcaaaggggccaataagatcggcacaacgaaaaaaggcatcggacctgcttatatggacaaagcggcgcggatcggcatccggatcgcagacctgttagatcgtgatgtgtttgcagaaaagcttgaacggaaccttgaagagaaaaaccgtctgcttgaaaaaatgtatgaaacggaaggcttcaaaattgaagatattctggatgagtattatgaatacggccagcagattaaaaagtatgtatgcgatacatccgtcgtcttaaatgacgcgctggatgaaggccgccgcgttttatttgaaggcgctcaaggggttatgcttgatatcgaccaagggacatacccgtttgtcacttcatccaacccggtcgccggaggggtgacgatcggttcaggcgtaggcccgacaaaaatccagcacgtcgtcggtgtatctaaagcgtacacaacccgtgtcggtgacggtcctttcccgactgagctgaaagatgaaatcggggatcaaatccgtgaagtcggacgcgaatacggcacaacgacaggccgtccgcgccgtgtcggctggtttgacagcgttgttgtccgccatgcccgccgcgtcagcggaatcacagatctttctctgaactcaatcgatgtgctgactggcattgaaacattgaaaatctgtgtcgcttaccgctacaaaggtgaagtgattgaagaattcccggcaagtctgaaagctctcgcagagtgtgaaccggtatatgaagaaatgcctggctggacggaagatatcacaggcgcaaaaacattaagcgatcttcctgaaaatgcgcgccattatctggaacgcgtatctcagctgacaggtattccgctttctattttctctgtcggtcccgaccgttcacaaacgaacgtcatccgcagtgtataccgcgctaactaagaatttgcagcaaacaagcctccggtcacggaggcttgtttttttatgtaggaaaaaaataatagatttttttcaaaaaagtagttgccactttcgaatgttctatgatattataaatctcgttgttacggaacagcttcaatagagtactgcaagaaagcttttgtctgaatgctctatgatacataatccgacacatcaggagccattagctcagttggtagagcatctgacttttaatcagagggtcgaaggttcgagtccttcatggctcaccactttttatggcccgttggtcaagcggttaagacaccgccctttcacggcggtaacacgggttcgaatcccgtacgggtcattgatttactttagcgttattgctaactccttatttgtcctcggagggccgccacgatacggctctccggacaaattactgtaaggtccggtagttcagttggttagaatgcctgcctgtcacgcaggaggtcgcgggttcgagtcccgtccggaccgccattttactttactttatagtatagaaaagaaacatctggctcggtagctcagttggtagagcaacggactgaaaatccgtgtgtcggcggttcgattccgtcccgagccacttacccaaacgcatctgcaatagtaggtgcgttttttcttttgttataaaaaaagggagagccggcttttcagccggcccagaagaagacgtcaaacactagacggcgttttttttcgtgaggtttcaaaaaaatattatttaaaagaaaataaaaaacatgacaaaaggatggcagttcaatacgtttttgcgctgttctctttaatttttttatcttttgacctgaaaccgttataatagacggggaacgtttttcacgatccgaattgtgatcatcatgaaacatcaatagatgaaatgaagtcattctggcaggaggaaaatcaagatgatggataagaaaatccttgtagtcgatgatgaaaaaccgattgcagatatattagagtttaatttaagaaaagaaggctatgacgtgcattgtgcgtacgacggaaacgaagccgtggaaatggtggaggagcttcagcctgatttaattcttttagatattatgcttccgaataaagacggagttgaagtgtgccgggaagtccggaaaaaatatgatatgccgattattatgctgacggcaaaagactcggagattgacaaggtcatcgggcttgaaatcggagcggatgactatgtcacgaagcctttcagcacgcgtgagcttctggcccgcgtcaaagcgaacctgcgccgccagcttacggttgcgccggctgaggaagaatcagcttctaatgacattcatatcggttctctcgtcatcttccctgacgcttatgtcgtatcaaaaagagaagaaacgatcgagctgactcatcgtgagtttgaattgcttcattacttagccaaacatatcggacaggttatgacgcgtgagcatctgctgcagactgtgtggggctatgactatttcggtgatgtgagaacggtggatgtaacagtgcgccgtctccgtgagaaaatcgaggataatccgagccatccgaactggatcgtcacaagacggggtgtcggttattacttgagaaaccctgaacaggactaaccggcgatgaataaggttggtttttttcggtcgattcagtttaagatcacgctgatctatgtgcttctcattatcatcgccatgcagattatcggcgtgtactttgtgaaacaggtggagaattctcttctcaagtcctatgaattatcgttaaatcagcggattgacaatctttcctattatattgagcaggaatataaaggagataatgacagcaccgtcattaaagatgacgtcaaacggattttgaatgattttacgaagaataatgaaatacgggagattacatttgttgataaaagctatgaggtcgtcggttcctcgaggccttatggcgaggaaatagcggggaaacagacgactgacccgatttttaaacggattttctcaacaaaacaggcctattcaaaaaaatattatgatcctaaaagcaaaaacagagtgctgatttcagcaaaacctgtcgtcacagagaatcaggaagttgtcggcgcgatatatgtcgtggccagtatggaagatacctttaaccagatgaaaaccgtcaactcgattcttgcttcaggaacaggcttagcccttgttctgacggctcttctcggtatatttctcgcccgcaccattacccatccgctgtcggatatgcgtaagcaggcgatggaactggcaaaagggaatttctccagaaaggtgcggaaatacgggcatgatgaaatcggtcagctcgcaacgacgttcaaccatctgacgagagagcttgaagatgcccaagccatgacggaaggggagagaagaaagctttcttccgttatcgcgtatatgacggacggtgtcatcgcaacgaatcgcaatggagctattattcttttaaacagccctgcgcttgagctgctgaatgtttcacgtgaaacggctttagagatgccgattacgtctttattgggcataaaagagaactttacatttgaggatttagtagaacagcaggattcaatgctgctggagatcgaacgtgacgatgaaacgactgtactgcgggtgaatttttccgttattcagagagagcacggaaaaatcgacggtttaatcgcggttctttatgatgtcaccgaacaggaaaaactcgatcgggaacgcagagagttcgttgccaacgtgtctcatgagctgcggacaccgctgacgaccatgcgaagctatttagaggcgcttgcagaaggcgcgtgggaaaataaagatatcgctccgcgtttcctaatggtgacccaaaatgagactgagcgcatgatcagattggtgaacgacctgcttcagctttctaaattcgacagcaaagattatcagtttaatcgagagtggattcatatgatccgctttatgtcactgattatcgatcgttttgaaatgacaaaagaacagcatgtcgaatttatccgcgagctgccggacagaaatctgtacgtggagattgatcaggataaagtgacgcaggttctcgataatatcatttctaacgcactgaaatactcaccggaaggcggacatgtcactttctcagtcgatgtgaatgagaaagaagagctgctttatatcagcgtaaaagatgaaggtatcggcattccgaaaaaagatgtggaaaaagtctttgaccgtttctacagagtggataaagcgcgcacgagaaaactcggcggcaccggactcggccttgcgattgcaaaagagatggttcaggcgcacggcggagacatttgggccgacagtgtagaaggcaaaggaacgaagattacatttactcttccatataaagaagagcaagaggatgattgggatgaggcgtgaaaatataaaaacagtcatactgtcagtgctggtcgtcattagtcttgttttaacatggggaatttggacattccagcccaatttttcagaaggcacggcctcaaccaaatcgactgtccgggaaaagcataaaattgataaaacgagccaaaaagtgtcgcaaacggtaaaaccccgggatatgtttattcatacaaacggctctcattacaaagtggatgatgagacgctctttaatgacctgtgggcggatttgccgcaatgggaagtaaaagggatgaaggatatttccgatcaatacgacaagctcggttttaaaaattggctttacggcagaaacggcaattcggcaaagctcgatctgcaattcaatgacaccattccgattgatttcttccaaacgatgtttaaatggtcgaatccgtcaatggaatacagctcatttgaccatattgtcattccgtttaatgagaataagacgaataagaagatttacatggtctcgtacagtaagcagctgattttggaagtgactgtggaatcggcgaattaccgcaatctgatgaatgagctgtacagcaaaaagtcgagtatgccgttataccacctctattcggtcggaaaaagcaaagaatttctcatgccgaatgcgcggtttaatatgaaggaaaaagaatttatcactgaaaccattaagacgaacctgtttaagcagacgctttttaatgatccgagcacggtcagagaagacccgaattacaatcggaatgtgctgactgacggaatcagccgtctggaaatcaattcgacacagcggcagattcaattccagcatcggaacctggcacaaagcgcttcttaccaaacgggtgagctgattaagaaaagctataaatatttagaggatacgggaagctggacggatcattatcaatttttcaatgtgagtgataaccagcagctgagtttctacatgtttaaagaccaaatgcctgtgatcaacagcacgtctaagcctttcggatccggacctgttttgaccctgcaatgggccaatgacgaggttctcagctacaagcggccgaactatgttctcggaccgaatccgattaaaacaaaagacgtgaaaatgatgagcggcaatgaggttgtgtctttgctggagcagcaggttaaatacgacgtgaataaaatcgaccagatcttcctgtcctatcaaatggtatcttcgtcaacgaatgatcttgttgaactggaacccgtctggagtatgaaaatcaacgggaagatcgtcccgattacgaaagatctgctggggaaggaggaggacgataatggagtggaataagacaaaaacgatcttcatcattgccttcctcatcctcgatatttttctcggctatcagttttttgaaaaacgctcgagcagtgaatacgaagtgattaaaaattcaaatgtggaaaaagacatggagatggatcacatcacattcggaaacctgtcttctgattccgcgacgggctaccggctgacggcgggccaaaaggtatttaccgctgaagatattgatgctttgaaggatcaaaagccgttaatggagatgccggcggatgatcacaaggtcacaacgctgaaaatgaaatttaccgatccggtcggtttatcaaagcaaaaaccgcaggaggatgcggaatcgctcgtcagctctaaagtaaccggcggtgaaaaatataaactgtggaaagtcgacaaggatcaaaaacagatcattttttaccagacgtatgacggacagtttatttatcaggattttgactcgtccacggatgcgatcggacaggtgattctgcatctgaacgataaaaacgaggtcgtatcttacgagcagaccatgctggagtcattcaagcgaatccagacggagagcctgattcctgagcttgatgcggtcgaattattgtattctcaaaattacttaaaagcgaattgcgccgttaaaagcgttaagttcggctatattgcccaatatccgctgacaagtacgcaggtgctggcgccggtatggagaattacaattgaagataagtcaaaagggacgaagaaaaagacacagcaaacgtacactgtgaatgcattggaaagcacagtcattgataacaatcaaaataaataatggagtgagacacaatgggcttgcaatttagcgtgcttgcgagcgggagtaccggaaacgcgttttatctggagacagaggagcactcttttctggtggatgccggcctgagcggtaaagcgatggacgggctgatggagaaaatcggccgcaagatagacgacgtggacggcatctttgtcactcacgagcacagcgaccatattaaagggctcggcgtcattgcgagaaagtacggtcttcccgtctacgccaatgaaaagacgtggaaagcgatggagaatcagatcggcaagctggataccggacaaaagtttctgttcccgatggaaagcgtaaaatccttcggcgggcttgatgttgagtcattcggcgtctctcatgacgcggccgagccgatgttttatgttttccactaccaaggcagaaagctcgcactgatgacggacacagggtatgtgagcgacagaatgaaaggcattatccgttcggccaatgtgtttgtgtttgaaagcaaccatgatgtcggcatgctgcaaatgggcagatacccatggagcattaagcggcggattttaagcgatgtcggccacgtctccaatgaagatgcggcgctcgccatgactgatgtcatcggcgacggcacatcgcgcatctatttggcgcatctgagccaagacaacaatatgaaggaactggcgagaatgtccgtgcagcagacattggctgcgaaaggatttgtcgccggggaaacgtttcagttatgtgataccgatccgaaaatcccgacgccgctgtgcgccgtgtaatttttccaaatgaatcatgattattaatccgcgatctgacccacactataagcaaatcgagtactcttgaaaggatttgagatagggtggattataatcgcgatgatgaacagtacgcctccgaacagccccgccgcagcaagagagggtactttctatcaagtctgatcggcgtcatcgtcggggccgcgctcatggctttcctgctgccgtactggacaggcggagaccatggagaaagcagcaaaagcaccagccagcgtctcggcaacgaacaggtgaaaacagtcaacgtaaatgtcaatgacgctgtcacgaatatggtcagccgtgtatcagattcggtagtcggcgttctcaatatccaaaagaccgatatttggggagagggcggcgaagcgggaagcgggtcgggcgtcatttacaaaaagaacggaaacacttcttatatcgtaaccaatcaccatgtcattgaaggtgcgactgagattgagatcagcctgaaggatggctcacgcgtgcctgctgaactaatcgggagcgaccgtttgatggatctcgccgtgctgaaggtgaagtctgataaaatcaaatcggccgctcagttcggcaattctgatcaggtcaaagtcggagaaccggtcattgcgatcggaaatccgctcgggcttgaatttgcgggatcagtgacacaggggatcatttcaggcacggaaagggcggtgcccgttgactcaaacggcgacggacatccggattggaatgcggaagtgctgcagaccgatgccgcgattaatcccggcaacagcggcggcgctttgatggatatatcgggcaaggtggtcggcatcaactcaatgaagatcgctgaatccgccgttgaaggaatcggcctgtccatcccgtcaaagcttgtcattcccgttattcaggatttagaaaaatacggagaagtcagacggcctttcctcggtattgagatgaaatccttaacggatattgcgagctaccattggagccagacgctgaaacttccgaaaggcattaaaaccggggcggtcattatgggtgtcgacgcgttttcaccggccggaaaagcgggtttgaaaaagctcgacgtgattaccgggttcgacggacataaggtcaatgacgttgtggatctccgtgagcgcctgtatcgcaaaaagatcggtgaccgtgtgaacatcacgttctaccgttcgggaaagaaaaaaacagcggaagtcaaactgacagaagcggatcgattacagaaataaaaaacagcccggacatccgggctgttttttattgatttatttgttaatattatactattatgaaaacgggaggtgacacacatgaaaacggctgatgtgatcatcgtattgaatgaaattgaaggtgaatgtgaaggaagaattattttagaatgcagaatttaagaacatgaaacatgtcatatcaaacgtcctttttcagggcgctttttttatgccttttttcagaagccataaaaaaagaactgaacgcgggtcacaacacgttcagttaaaaatgggtatatttagaaaaaggcagacatgaacttagaactggtgctgctgaattgaagcggcagataatgatttttatttgcagattgctccgttttcagcgtttcctttcaccaattcagcttagattccgttttgtttcagataaaagcgaataatagaaggggaagcgaaaaaaataaacacaggctgatacatctaaggagagactgcatcatggaaaagttgaaaggcatcaagctgagtgcagacggcgagtctgcgctcattgattctttaacgatggggcttcattacggaacggtcctcggggaagacaatatcgtcgaggtgtacatccgttctttgcgcgaaaagctgaaggataaagaacacaaggtgattcgcacggttcggggcgccgggtacaggatgaatctggcatgaaacggctgtacagaaccctgcggttccagctcctgttcaggtcactggcgattttggctttgctgttatgtttcatcggcggtactcagtacatgtttatgacacggacgatgtatgaaaatcaggcgatcagcattcagagtgatatcaattcaatggatcaaagcgtatggaggtcaatcaaaacccttgcccgttccgaaacaccggctcatccgaatttgatttaccccggggtgacggttgcttttatcaatcaatcatacaagatgtctgttttatcagaagacccgcacgcgggggccgctccttctttcccgaaaaaagtgtacagggatgcgctgacagacaccatggcgcttcactatcaggtggctcacaatgaggcgggtgaggaaatcatcgtcgtgtttcaggcgatttccgttgacggaaggcaggcgggagttgtgcagatgagcacgctgacacagcctttgaatgattcgcttttccgccagatcagcattttcgcggtgctttcctttgcggctttggtcatcggactgtttgttttcttgccggtgatccggctcacactcaagccgctgtcccgcattgtgcgtatgatgggtgacatttctgccggcagtctcgataaacggctgccgatcgataggaagcaggccgaaattgagtcgctgggcatctccatcaatcagatgctggaacggattgaaacctcttttcaggcggaaaaagaagagaaggaacgaatccggcagtttgtatcagacgcatcgcatgagctgagaacgccgcttacctccattcacggctgtatcgaaatgttaatgcgcggagcggcggagaagccggagcagaaagaaaaagcgcttcaaagcatgtacacggaatccgccagggcgaataagctgatagaggatcttctgtttctcgcgaagattgaccgggtgccgagctttgaaatgaaaaaaggcgcattgggagacgtcattttggaaatggaggctcagctgaagctgctcgcgagaaaccggaagctcgagttctttgtcgatcaaaagatagaagccgtttttgacaaagacaaaatgaagcaggccattctcaacctcttttacaatgcggtgcagcatacggatgaagacacgggtgtcatcaccgtctccctgcagaaagacggaggaatcatgcttatgattgcggataacggaacgggaatcgctccggagcatgtgcctcatttgtttgaccggttttacagggcggaaacctcccgatcccgtcaatccggcggcgcggggctgggtcttgccattacaaaaaccattatcgacagtcacaacggaacaattgaagtgaaaagtgagcagggaaaaggctccgtgttcatcatccggctgccgggataaaccgggaagcaggaagaaatatcacaatttatatgtaaattctaaattttcaaaaaataacttgtccttttccaatattggtgataatatctagttattggtaaagggggtgtgtactgatgaagattgaagaacttgatcttgatacagaaacagcaagcttggtgcatcgctgctagtaaagccgtgactcccctcattggggagttattatctttcagggggtatgtcatgatgtcaacggactgtaagcgctggaagtttaaagacagcgtgcaggtgctgacctacacggcgcatattatcattcaatatcgaaaggcgattaagcttgcgcatacgagtgagatcaaagaggcggttgaacggctgatcatcggctgtgaaaaacaagagctttctgatcttctgggagaggaagcgggaaaccagtttttcgatgctttaatgaaattggatgctttaatagagccatggcaaaacggccgtgaaggccgcatcactgaaaagcagctgtaccattttgagaaatacaaccaaaaccccaatctgatccaaaagagattagacggcagcagggcagcgatcgtgggtctggggggcgtcggaacgatcattcttcaaaaccttttggcggcgggcatgcagcattttattctcattgatttcgatgccgtatcagtacataacctgaacagacaattcgtctataataaatcttctgtaggcaaattaaagatctcagaatgcagagattatattgcgggtatcaatccccatgcggacgcagcactttaccataaggaaattacacagccgcaggacctgcgtgtgttagatccgtacgaaattgatatcgtcataaatgccgctgacaaaccccataacatttctgaatgggtttaccggtattgtaaggagcggaatattgcatttatgaccgggggtgtcggcagcttcagcggccaatgggggcctctgctcacgcctgaatcctatcaatccggcgtcacctatgaaaaaaacatgtcggccggacttctgaactgttaccccgatgaaccgatcaaaggttccttaggagcgacaaacggtattatatcctcgtttatgtctcatgacattatcacataccttgcaggcggaagcccgaaatccctgaatacccgcatcggcctggactttgacggccttcatattacagaaacgaagctttctcaaaaggaaagcgctttatgaagacgatgcatcgtacggcgagaaaaccgggcgaccctctgaaaatagaaattgacacaagcccgatacgcttgaacccattagatacgcaggattacacaagcaagatgatttgcagcattatgtatgaaagcctgcaggacggctataactgccggatcatccgcaaagatccccgcacctgtcaggtggacattcacccggactatttaggtgacgccgagggtgtgattcaaacgatcatctatcatctgacgaaagaaaatcaaagcccccatctcggcagtttcctgaacataaaacaggccgttccgtatgtaaaaggcctcgtctcttccgatcagctcggggtgaacgtaacgggcgaaaaacgctttgaagtcaccttggacgagccgtctgatgaaatagaagccgttttgcagagcagctttctgattcctgggaccgccgggggcgatgtgccggaaaacggcccgtaccgattcaagcgcacgtttgagaaggggctggaatttgagcggaatccgcaatataaaatgacgcccgcggatcaccgcacggttcagaccatccaatttattttgaatgatgatctggaaaagagcatcgggctgtacgaagcgaatcaaacggacgtgacctgccacacccagtttcatcattcaaacatgaggtatcggcagtatgctgattttaaagaaaatcatttgccgatgttatttaccttcaaggtaaaggacgacatgctgagaactttcattcagcattattttgataaacaaaagctggccggggatttggggcatatcatcacaccgactgattcactgatcggtatatgggaaagcgggaggacaccgcagaaagatccgccccttttgacaagagaagaaccgatccgaatcgtttatgccgattattatcccaacggagagatcattgaaaggctggctgatttgtttcgacgggccggagcggacgtgtccgtctcccgcgtcagtcatttcaatgattattaccatatggataaaagccggtttgatattgagctccatttgttcctgccggcttacatgcatgagctgagctatatcaaatatttcatccgcgacatcagcgatccagggaagaaaaaaacgatcattgatgccgtaggatctgaaaaaaagaaggaactttttgggttattcgagaatacaactcattattgcccaatttgttttgggaaaagtctgtatctgcaagatccatgtatagagggttttagtgtaaagactgacgggctcctttctgttcatgatgttaaatgcagatagctggaaaggggtattcatttgcggaatcgaaatttgctttacttctccggttttttcggaaacttctttttcgaacggggaatttggattttatatttaacaagcatgaattattcattgtttctagtgggcatcctgcaatcggtcctgaatttggcgatgtttctggcggaagtgccgagcggcgtcatctcggacagaatcgggagaaaaaaatcgctcttgctcggccattttatggtcattgtctatttggtgatgttcctgagctttcataacttcatcgccctcttcatcgcccatattatatacggtatcgggctgacgtttatatcaggaacggatcacgcctttttgtttgattcactgaaagaacaagggaaagaaaaatggtacggcaaatccatcggaaactataacggacttgtcatactcggtcttgcgatcgccatgggcatcggcggctacttgcaggaaatatcatggtcgtatgtgtttatcgccgggattgtcactcagctgattgcaatggcggtcattacacagctgacggaaattaaatttgaaaacagtgaacacgaaacgcagacggtcggtgacatcttaaaagaagtcaaagatttcttcaggctgaacaaagcctttaaatatctggtgctgtcactctccgttttctttgcgattacatcggttttttatatgtacggacaagatctgttaagtcaggaagggctgtccgtgcgcaatatatccattatttttgcgggactgtccatcttgcaggcgctgtgctccatcttttcttccaagccggcggaaaaattcacgccgaggcgcgtgcttctgctgacattctgtatcatcggggcggcctacctgtttataccttcgggcagtctgtacgtgacgattgcagcttttgtcgtcattaacgcgctctatgatgtgatagaacccgtatccagtcaggtggtgaataatgagattccgtccagaacgagagccacgctgctgtccattatcagtttgatgacctcgctcttcatgttcattgcctttccgtttatcggattcttaacggactattttgattcagctttgctgctgaccgcaatcggggtattatccatcttattgtcgctgtttatgatgctcagcttttacaaactgaaagcgagcgtcgccatccagaataaagtcgagctttgaaccagaatgacaaagggatgatgtgagttgctgaatattcataatcttacggtaaatttagcgggagataccattttcaaacaagtttcttttttcatcaatgaaggcgaaaaagtacttgtggccgggccgaacggttccggcaaaagcacgctgttcagggtgctttccggggagcttgaggcagatgaaggaacgattgcgatcaacaaaggggcgaaggtcggtttgctgaagcagatcgctgatccccatgaagatctgacgttgtatcaatatctggaaaaatcatttgaagctctcgcggcgatccagaatgaaatgaaggccattgagctgaagctttcggaaccgatgagtgatgacgagctgactgctttattggaaaaatacagtcaatacacggaaacatttgagcggaacaacggctaccagatgcatgcgatgattgacgaggtatgcaacgggctcagcctcagcgaattaaaggatcagccgttttcaaagctgagcggcggcgaaaaaacaaaagccggccttgccgaaattttaatccgcaaagacgacgttatactgctggacgagccgaccaaccatttggatgtccatgcgattgagtggcttgaagggtttattaaaaaatcgaacaaaaccattctgtttacgacccacgataaaacgtttgccgaccaaacggcgatgaaggtgctcgagattgacgataccgaggtgaagatttggccttacggattcagcgaatacttgaaaaagcgggaagaattcatcatcgcccagtttgagaaatatgaagaacagcagagaaaaatacagaagatgaaggaatccatcgcccagctgagagattgggccaaccgctcaaatccgccgtctgtcggcctgcacagacgcgcgaataatatggaaaaggcactgaaaaggatcgagctgatcaataagccggtccggacggagcaaaaattaaaaaacgcatttcaggaagcgggcgccggttcaaaagatattgtgttcattgaaaacggaaaggtgaccaacggatcttcccttttatatcaaaatgtgaatctgcgcataaagcataaagacagaatcggcatcgtcggcagaaacggcgtcggcaaaacaacgctgatccgctgcatcatcggggaaaaagaactgtcggacggcaccattaaagtgggagaaaatcttaagataggctacattgatcaaaagagccacgtcggagattcgagtcagacgattctgcaattttttaaagaaaatctgctgactgaagagggcatggcccggaatatgctggccaagtacggattttacgggtcgtcggtctttaaaaaactttccgtcctgtcgggcggtgagagaatcaggctgaagctgtccatcttaatggaaaaaaagctgaatgtcctgatcctggatgagccgaccaaccacttggatattgaatctcaggaaattctcgaaaacagcctgatgcagtttcaaggcaccatcatctgcgtttctcacgacagaaacctgctggagaagttcaacaagattttctggcttgagaatcaaaacgtcaccatcttttcaggtccatacagttacgccaaacaaaaaaaacggcagattgccgaataaaaggggaatggatatgaccattgacagactgacaatcaatgagttatcgtacgatctttttgtaagcgagtatgctgataagaaaccttttattttgacgggggcaatggatcactgggaatgcagaccgtggacgcttgaatacattgacgaacactatggggacagaatggtcaccatccggaaatcagatatcgaaggggtcaaaacgtttaaacaagtaaagctttccaactatatcgagtacattgatcagaatgatgacaaatggtactgtgactggaactttacgcagctgaaccaaaatgacttagaccttgtctattccgcacccgagtattttacaaaagacacattgagagcggatgaagaaacgggacgggactggaaatggttctttctcggttctaagcagacaggcacgccgctgcatcaggattttaacaacacgcacgcgtggaacggcgtcattttcggggagaaggaatggatcttctatcatccggacgactctccgtatttgtacgaaggaaatatcaatgtctttgatgaaaaagacattgagcaaaaaccgctggtgcaaaaggcgtctccgctccgcttcagacaaaaggcgggagaaatcatttacgcgccgcgccgttggtggcatcaagtcgagaatacggaacatacattggcagtgagtgagaacttttggtttaccggagagcggcttgccaatcagatataacctgacgaaaggctgaggagcatctcagcctttttttgtatggattcatttcatccggtccagaccgaattttttcaggcggtattgcaggctctgtctgctgattccgagctcgtttgccgttttggatatgttattgccgtgttttctcaggatcttttcgatcatgtatttttcgaagttttccattttgtcttttaaatcggtgccgggctgggtgcttgcggcggctttggtttccgtgtcagccggtttgattttcatccggtattggtaaggcaggtgggccgccgtaatcgtcgtttcatccgtcataaagttcatggcgccttcaatcatatgttcaagctcgcggatgttgcccggccagtcatattccaggaagaatcgctgcacatcgtcactgatcgaatcgacatgcatttggaacaggtgattgtttttctggataaagacttcggccagaggcagaatgtcctccttgcgctcccggagcgggggaatgatcagtgtgacaacgcttaagcggtagtataaatctttgcgcagccgctcttccgaaatggcggtgatcgggtcttcattcatcgtggcgatgatacggacgtcaatcggtttgtcctgcgctgatccgatgcgcctgattttcttttcctgaagggcgcggagcagttttgcctgcaggctgagattgagcgagttgatctcatcaaggagcagggtgcctccctgcgcctgctcaaataagccgggctggtcgatggctccggtaaaggcgccttttttcgtgccgaataaaatactttcgaccaggctatccggcagggcggcgcagttttgtgagatgaacggggcgcctgagcgctggctgccgttgtgaatgctttgggcgaacagttccttgcccgttcccgtctcgccggccaaaagcaccgatgatgatgtgcgggttgcccgtttcgcgttttcgatgacttcccgaatgaccgggctgttgccgagaatactgtcaaacgtgtagctgttctgttctttcctgtgcatgttctccctgatcagccgttcgagcttggtgacgtccttggcgatttccacggctcccttgatctcgccgttttgcacaatcgggaaagtgtggttgatcgtcgtgatttcctggcctttgttattgaaatagctttgctttacgtttttaatcgttttgccttcttgaagggcctgaacgagcgtgctgtcctgctgattggaaaacataaatacatcagtcaggtttttatgcaggacgtcccgttcatccatatcttcaatctgcatcattttcttattgtaaatgacggtgctgcccttttcgtccaccacatgcagcccgacatcaatctcttccagaatgctttgtaacacgagtgtgtaaaattcgctggttgtgtgcaggtcaattccccctcccaatcgtcttaacattcattattttaaaataaatcgaacgggaaacgcaaaaaaattttgcgcttggacgatgtttaaaaataaatggaaattaaggtaataaaaccattgacttttttaaggaaatggttgatatttagatatatacttaaatatctaaattatgtatgtatgagagggggaaagtttttgaataaagcttttaaagcactggccgatcctacaaggagaagaattttggatttattaaagaaacaagacatgacggctggtgaaattgcggaacacttcgacatgtcaaaacccagtatttctcatcaccttaccatattgaaaaatactgatttggttcacgatgagaggaaaggccaatttattatgtattcattaaataccactgtattacaggatcttataggctggttcttttctctgactgattcagaacatgataataagaaaggcggggaatcatgaaaaaatatctcttttcggcaggaatcatagttttaactgttttcacatgggtttgcacatattcatctttaccggacaatttggcgacacactggggattaaacggaagtgcaaatgattaccaaacgaaagctaatgcgatgatgatgcttattggcatcatgattattctatatattttaatggttatcatccctaagattgatcctaaaaataactacaaaacatttatccggccatatatggctatatttaatacaatgtttgcggttctgtttgtcattaatctgattaccatcttgaccggtctgggatatgatctccctatatcttatttaggaaactttatagtgggagtcattttcatggtgtttggaaacttcattcagatcgttaagcctaatttctttttagggataagaacaccttggacgctgagcagtgaaagcgtttggaaggatacacacagggttagttcgaaactttttgtcttagcgggcatgctcatgatgcttgcagcttttttgccgccggtgtatagagtgtcagtcattttcatggctgcaatcggctgtatcatattatctttactatattcttacattgtatatcagagacaattgaataaataactgttgagtaggagcaatctaattggattgctcctattttgtcagcgggaaacgcaaaaaaattttgcgcttggctgaagtttgcacacaaactgccggaaaattttgcgggaaaagaaagaatgttggcgaaacatcccgttttttcggattggcacggaacttgctttataaaaagggaaagcaagatctaatgttgaatgattacaaaacaagggggaatcagattatgtcagctttcacaaaatctcaagaaattatcagccaaacttcacattacggcgcgaacaactatcatcctctgccgattgttatttctgaagcgcagggtgtttgggtaaaagaccctgaaggcaatcaatatatggatatgctgagtgcttattctgcggtgaaccaggggcacagacatccgaagatcattcaggcgctgaaggatcaggcggataaaatcactctgacgtcacgcgcgttccataatgatcagctcggtccgttttatgagaaaacagccaagctgaccggaaaagatatgattctgccgatgaatacgggggcggaagccgttgaatccgctgtcaaagcggcgagacgctgggcatatgaggtcaaaggagtagcggataatcaggcggaaatcattgcgtgtatcggcaacttccacggcagaacgatgcttgcggtatccctttcttcagaagatgagtataaacgcggtttcggacctatgcttccgggtataaaattaattccatacggagacgcagaagcgctgcgccgggcgatcacgccgaacacagccgctttcttattcgaaccgattcagggagaagcgggcatcgtcattccgccggaaggatttttacaagaagcggccgccatttgtaaggaagaaaatgtgcttctgatcgctgatgaaattcagacgggactcggccgcacagggaaaacattcgcggttgactgggaaaatatcgtaccggatatgttcatcttaggcaaagcgctcggcgggggcgtcttcccgatttcttgcatcgcggcgaaccgtgacattctcggcgtgtttaacccgggttcccacggctcgacattcggcggaaacccgctcgcttgcgcggtatcgctcgcatctcttgaagtccttgaggaagaagggctggcagagcgttcccttcagcttggccgttattttaaagaagagcttgagaaaatcgataacccgatcataaaagacgtgcgcggacgcggcctgtttatcggcgttgaactgacagaagcggcccgcccgtactgtgaaaagctgaaaggcgaagggcttttatgcaaagaaacacatgataccgtgatccgttttgcaccgccgttaatgatttccaaggaagacttggactgggcgatccaaaagatcacaaacgtgcttcaaaacgcgtaaaactttgatgcggcaatgctttccctcggcttgtatggaatttacaaataaaaaattcagcacactctatttgcgcggcgacagtattttagtataatgtatctttatgtacgaaaatgaatttaatataacattcatatacaaatagaggctctttggacagcaaatcggtttcaaagcaccggcttggttccaatacaagttgctgaaggggtgcagaatagtgaatacaaatcaaaaagagaatcagcttcagcgcacaatgaaatcacgccatttgtttatgatttctttgggcggagtgatcggcaccgggtttttcctgagtaccggatttacaattaaccaggcgggaccgctgggcgcggttctgtcttatctggtcggcggttttataatgtttttgacaatgctctgcttaggcgagcttgcggttgcccttcccgtatcagggtcgtttcagacgtacgcaaccaaattcatcagccccgctttcggtttcgcattcggctggctgtactggctcggctgggcggtgacatgcgccattgagtttttatctgcgggacaattgatgctccgctggtttccgcatgttcccgtatgggtgtggtgcctcgtgtttgtcggactgatgtttcttttgaacgctattaccacaaaagcgttcgctgagtcggaattttggttttccggtattaaaattttagtcattctgctgtttattattttgggcggcgccgccatgttcggcctgattgacatgaaacacggcgagcaggctcctttcttctctcatttttatgaggatggattgtttccgaacggcattaaggctatgcttattacgatgattaccgtaaacttcgcgttccagggaacggagctgatcggggttgccgcgggagaaagtgaaaatcccgagaaaacgattccgcgctctatccggcagacggtatggagaacgcttgtctttttcgttctctccatcatcgtcattgccgggatgattccgtggaggcaggcaggagtggtcgaaagcccgtttgtcgtggtgtttgaacaaatcggtattccatatgccgccgatattatgaactttgttatcttaattgcgctgctctcagtggccaactcaggcctgtttgcatcgacgcgtatcttatatgctatggcgaacgaaggacaagcctttaaatcgctcggcaaaataaataaacgcggcgtgccgatgaacgctctgatcgtgacgctggccgtcgcctgcctgtcactgctgtctaaagtggcagcgccggaaaccgtttatatgtttctcttatcattagccggactaagcgcgcaggtcggctggattacgatttccctgtcacagctgatgttcagacggagatacatccgcgaaggcggcaaagtggaagacctgaagtttaaaacaccgctgtacccggtgctgcctattatcgggctgacgttaaatacggttgttctgatcagcctcgcatttgattcagaacagcggctcgccctttattgcggcatcccgttcatggcggtgtgcgttatcgtctatcatctgtatgtaaaaaagcataagcagtcagaaaaacagatagagctttaaatcttttcgtgtccaagtcatctttgagaaacccgcacaggacaacatacaacatgttgaggtggaaaaacggatgaacaagaatatctcagttattggaatgccgatggatttaggacaagcacgacgcggagtggacatgggcccgagcgccatccgctacgcgcatctcattgaacggttatctgacatggggtatgcggtggaagacttaggcgacatccccgtcaatcgtgaaaaactcaaaaatgatgaagagctgaaaaatctgaactctgtgctctcggggaacgagcagctcgcccaaaaggtggacagcgtcattgagaatgagcggttccctctcgtcttgggcggcgatcacagcatcgcgatcggaacgctgacaggaacggcaaagcactataaacagctcggcgtcatctggtacgacgcgcacggcgacttaaacaccctggaaacatcgccgtcaggcaatattcacggaatgccgctggccgtcagcctcggcgtcgggcacgacacgctggtgaatctgggcgggtatgccccgaaaatcaagccggagaacgtcgtcatcatcggcgcgagatcgcttgatgaaggcgagcgtgagtacattaaggaaacaggcatgaaggtctatacgatgcatgagattgaccgcctcggcatgacaaaggtcattgaagaaaccattgactacttgtcagactgtgacggcgttcacctcagccttgacctcgacggccttgatccgagcgacgcgcccggcgtaggcacacctgtcgtcggcggcatcagctaccgtgaaagccacttggcaatggagatgctgtatgatgccgacatcatcacttcagctgaatttgtcgaagtcaacccgatcctcgatcacaaaaacaaaaccggcaaaacagcggtcgagctggtggaatctttgttaggaaaaaaactactataaaatatgcgcctccgcacctgcggaggtttttttgttgccacgaggaaactagcgggctgccaccctctttttgaacctgtaaatatgatatatttattacacaaaatgggaaagggaggtgtcctgacagatggctgaggtgatggcccacgaaacagttgcgaaaaaaatcagtgactggtatgaggaaatcaaaaagcacaacaccgaatcggctgaggcgttaagagaacaactgcttacggatctgcaaaatatgacacaaaatcaaacggtgctcctttattttaatttaattgattcccgctacaaacttttgatggaagagtatgagaaaacagacggcattttaaaaacgatccagctgaacgccgataaagaaaaaacagaccagatgattcaatactattattatttcttttccggaatgcacgagttttaccgtaaacggtttatgaacgccattaatttttaccggattgctgaaagcaggctccggcacataccgaatgagattgaaagagccgagtttaattatcaagtggcgattgcctactatgaaatccgccaaaactactttgcgatgaaccatgcggaaaaagcattagagatctacaaagccaatgaaatgtacgcggtcagagaagcacagtgtttaatggtgatcggctgtaacagaatggacttgtttcactatcagaaagccgaagagctcctgcagacggcggttcatcaagctgccaaagcgggcgatccgcatattaaggcgctcgcccactttaacgcaggtatttgctatgaaagacaggaaaagcttgaggaggcgcgggtcgagtttgaaacggctctcgatcaaaaggagcatttgcaatcagcgtattcggtgcggagtctgtacatgctggccagagtgttattgaaacaggaacaggcggatgagggccggttttggctgcataaagcgctgaatgccgctgaagaaaaaaacgagcccgtatacacccaaaagctgcgcatcttacagcatgtctttattgaccgcaatgaagaagcgcttgaatcagctttcgccgagttaagaaggaaagagctgtggagtgacgtttccgacttgtcgtatcaggccgcggcgcattttaaaaaacaggagaattacaaactggcggcgaagtattttcaagaatcaattgatgccaatgaccaaattttgagattaacggaggggattcgtaatgaaaacatgtaaattcattgtactctcagcagccttggcaagtctcatttcgattggattatttgcgcaaactggttcaacggcacaagccgaacaaatcataaaaccggcggaaaacggagccttcggataatacttcatgataccgctttcagtctgtgttttgtaaggagtgattcaatggctatcacgctgcagccgatgacaggacaagaatttcagtcctatctcgcccattcagccaagcattacgctgaagaaaaggtaaaagcgggaacgtggctgcctgacgaagcgccggagttagcggagctggcgtttgaagacctgcttcctgacggcttggagacggccgatcactatttatggacgctgacattggacggaaaggaaaatgccggctggctgtggctgcacgccgatccggaccacccgcagcaggacgcatttatttatgatttcggccttcatccgcctttccgcggcaaaggctatgcaaaagaggcgctcgcaaggctggaggacaaagccaaagacctgggtgttcgcaagatttctctccatgtgttcgctcataacgaaacggcgcggaagctgtatgagaagaccggatttctggagacggatgtcatcatgagcaaaaagctgtcatgaaaagaggcccgcacgatggggcctcttttgttattcatctaacaatgtcatcatgtgttccggataacgctcgccggccgccgtgccgatcggaaacatctcatccaaccgcgccttcacatcctcgggaagcacaatgtcgagagcggcgaggttctcttccaagtagtgtttcttttttgtacccggaatcggaataaggtcatcgccgtttgcaagaacccatgcgagcgcaagctgaggcgcggtgatattcatttcccgggcaatggcgttaagtttttggacgagccctatattcaccgccaaattgtctccctggaatctcggcgttcttcttctgtaatcatcggcatccagctgctcggtcgacgtcatctttccggaaagaaaacctctgccgagcggactgtaaggcacaaaggaaatgccgagctcacggcaggcgggcagcacatgctcctctgcttccctgctccataaagaatattccgattgaagcgcggcaatcgggtgaatgcggacggcgcgcctgatcgtttctgcggaagcctctgacaatccgatatacctcacctttccttcgtctatcagctccttcatggcgccgacagtttcttcaatcggcacccgcggatcaacccggtgcagatagtaaaggtcgatataatccgtcccgagacgtttcagactggcatcacacgcttttttcacataatcgggccgtccgttaatttcgataaactcacccttttcgcttcggacataaccgaatttcgtcgcgaggtaaagctcctttctgaatggggcgagtgctctgccgacaagctcttcatttgcacccaatccatattgatcagccgtatcaaacaaattcacgccgagatgaacggcatgatgcagggtggaaatcgactcttcctcactctggctgccgtagtattccgacatgcccatgcaccctaaccccattgcggaaacccgcatcgaaccgatcgttctgtccttcatatgtcctccccctttcttgtatgataaccggatttcctgatatttgaaaatggtttatgcatatgatttacatattgttataaaatttataaaaatctgtaaattatctatttttttatcgcaattctgtcatataatacaaatgtggaaaaattatactcaaagaaaagaggcgaagtaatatgtgtaaaaagctgttcaaagccgtcctcccgtttgccctgtcattcaccatggttctgtcgttctccggtttgaatgtaaaagcgaaagaaacagaagcagcccgctacgcaaaagaaatcgcagagcttcagcagggcacgactcctcaagacgttctccaatccgccaaagagcttgccaaacagaagcacgtttcaacagaagcaattctcaagcagtttcatcaagaaatcacggcagacaaggtgcagggaaatgtaatcgcttccaaagaagggttctctgcgatgggcggatcgtcaggaaccaaaaaacttccgaaaagcacaaaaggcaatatttattacacgaactcatacaccgcttattacaaccacgggcatgtcggcatgtattcatccgctgataaaattgttgaatctgtgccgggagacggcgtccgccagattgcttataacggcagagaagtcgaagacaattcaatcgttcagaccgtgaaagttaccgatgcccaaaaacaagccgccgctgactgggctgtatcaagagtcggtgatgagtactccttcaacttcgtcaataacagaaatacgggccatgaaggcgccaaaaactgctcaaaactgctgtggtcggcattcctcttaaaagccgggattgatatcgactctaatggcggcttaggcgtatacccgcgcgacatcacaagctcgtcctacacaaccacgattctgaccattcactaaggagaacaacgtgaaaaaaatcatttggatacccttagtgatcatcgccgccgcagcggttttatgcttcttctatttccgcacggaagaccctgcggaggttgcgagagacacattaaatgaccctgattttctgaaagataaagaggcgctgctgtacttctccactgcggctgaccaagacacgttcggcggcggaaaaagctacgccctcttcgccgatgaaaaaggacggctctcttcttatcacatgaaggggcttgagctcggatcggccaaagtgcatgacggcagcgtgctgctggaggacaaaaaaggaatctataccgttcaggacggccttcacacgtataaaagagcgtaccagcatacgggagacagcgcgggatatatcgagcgggcgaaaggcttttacacgctgtataattcgggctacgacaagagcggcggcagctatcgctcagagctgtaccgccagatggacggcaagtggaagcaagacgtcattccgcactatatccgcgcttcaggcttttttaaagatcatcttttcgcactcacgccgacagatgacgaaaaaggctatcacgtccaagacattcaggctgataaagagaagctccatacaaaatcaatcgcgacgtggacgtataaagaaggcacgtctgtcgaatcccagctcgtcgcggatgacagcgccgtctgctttgtcaccagaggggaaaaagcagaacacatctatcaaatggtgaaagtcatgaaaaacagcggcgccatcaaaacgtatgacatcgccgcttataaaaatgacgaacagacgatctatgactccatgccgttcagcttcaaaaaaagctttttcatggagcggcgcagcttctatttcgttgacggcttcggaaacgtgtaccgtatcaactctgagaccggaaaaagcaaaaaagccttcaagctccccgcatcacgaatgaaagccgacttcaaggagctgacccatcaaaacggaaagctgtatctgtttacgtacagctacaaaaagcctgccaaaatcgaatccttcgatctgaaaacgggcaaaaaactgaacggcctgaccatcccgggtctgaaagatatcgtgacgccgaaaagccatctcaagctgtatgatgtgcaggtgacggatgggtttgagaaggaaaagcagtcatcataatgaaaacacaaactttggattatataaacaaaaaaaccttttattggtttacctgtactcgtttgaggatatagagtagtagactgaataaaaggaggatatatagtgaaaaaacgtttcaaatggtttgtgggagtagttatttttgtttttatgttcagtttttcaggtgtgacagaagctattagtacaaagacaataaaagatgaaatcacatgccctgtctgtgataaaacgattaagtctgaaggaagtaaaaaagacagacaaaaagctttgaatatcgtcaaagacagagatgatttggatatagataaaacagaagtctttgtgactgttttaaataataaagatcataagattgcattggttcattatgaagatcagcaaaatcattcatttgcgcagaggtatattaatttaaacactgagcaaatcgttttatccgtagagggtataggaaaatgggacaaagaaaaaaaagaaggaaacttcaaattaagagttggcgataaagaaattattaatgaagattttaatcaagatggattaaaaggcaaggggaataatgctttattgaactctgtcaaaaaagcatctccgacaaaatcaaaattggagtcctgtaacgatttagtcacaaaaatgctggggctgggatccagtattgcttgcgcaggtgcttgtatggctgtcggaggtgctgtcggcgcagtagtgtgctcgcctttatgtttagcaattgaaaatggagttggcgaagcaggtgctaaagaaatttgtgaacaattctttggttgaaatatgcagatttgaaaagagcttgccgcttttggtaagctttttataatgaaacgttactgcaagaaagaaggtggtcatttgaaatcattcagtatcttcttattgttgtccgtcatttgcataaccattgtttttgtcataatgaatatgttgattggataccctgatgtgagtaacggggcagtgattatggttgtatatatcgttgtgaccctcttgataaggctatataacaagaaaaaagccgaccgaacatagagatagaggaatttaggagggagccgatgaagaaaaagcttgccgcggtgaccgtaaccattctcctggtttccgtaataaccaactcttttttaaacggcggaaagccggactggattgatgtttgctctacactgctggcgtgtctattaggaattctgttcgtccttcgcttagagaaaagagaaaacacgtaaagagccggatgctgaaaacaccggctctttttgcgcgtgatttgccgaattgtggataaaactcagcccgaagcactactaacatgtgtataaataggttatattgaaaagagaacaattgccgcgtgcaaaagaaaaccggaggacgtaacgatgaaaaccgcttattattcttgtgaagaacatatcgaaaccgtgctggacatgtacatagatgatcatgagcttccgcccgaaatcagaaaaatcgaacatactaacagtttatccacagcctgtgaattatgtggggacactgcaacatatctagtagggaacgaatgatcctacacaaaatacagaaaagatatccacaattgtggacaatatatatgaataacttgtttctaaagtggggatgacctgtgaatatcaatattgtgaccatcggaaaactaaaagaaaaatacctcaagcaaggcattgaagaatacaaaaaacgactctcagcctacgcaaaaatcgacatcatcgaactcccggacgaaaaagcgccggaaaacctgagcgaccaagacatgaaaatcgtcaaagacaaagaaggcgaacgcatcctggccaaaatcagcccggacacccacgtcatcgccctcgccatcgaaggaaaaatgaaaacatccgaagaactggccgatacaatagataagctggcgacttatggaaaaagcaaaatcaccttcgtcatcggcggctcactaggactaagcgacgccgtcatgaaacgggcagatgacaaactgtcattttcaaaaatgacatttcctcatcagctcatgcggctcatactagttgagcagatttatcgggcgtttcggattaatcgtggtgagccttatcataagtgagtggggttttgattaattatataaagtgattatgaaagaaagagtcactcaactattgaacgactctttctaaacgaaataaaaactgatttttttaccattcatttattaatcgtactaacttgtataattcttttttattagatgtcctctacaccaaaatacttatacaagcctttttcaatgcaatcttccaatgttccaccacaaagttctgcaactgacattatatcaatgtctttaaagcgaaatttatttgaataactattaatagatatgcttatttttaatctatttgcatcacttaaaatctctttttttactgcattattgctatgtacaatattatttctgacattcaaccaaaaccttattaattcatacttttttgtcccaacaataaagtggttttcttgcttttcaatgtatttttcgaaatatttaaggtatttaactataccattatcacttctattcataacatctttcatttcaggaagtgatggttcagattcaatgagtttcttggtcaggctaaataaagtcgattccaataaacttagaaacattacaatagatgctaaagaattcatttcaccctctaattctatttgttttaatttgaactccctttcggacacatgacgagattgaataacatctacccattccaattcatccgggtctttcgtctgttctcttaatctttgatacttttccaacatttctcgagattcttttaatttcgaatcaatttccaatttaagtctactaccatttttttttgaagaccttaatattgataaagattctaagtagtatgtatctacaatactatataaatctcttatcaaaagggacggtaaattatcttgtacttggcttatatgagaaagatgcgacattgaaaaataaaatttctgtattggaatttcctcgatattttctatctccataagcattaagcacctccgcaattccttatatattttattatctaattttcccattcgaatctatactaatgtgcattactaatagaataataggtaaattctaggtataatatactctcatgtaaatacagttcttaaaagaaatactcatttcatcattagagattctaaaaaaatcactaatattttcttattaacatgcttttttaaaaaaagaaaatgaaactgggcatcacctaaatgtgtaaaaagttataatataaattgattaaattttaaaagaatttatattactgctaatctttccttcaagatatattgatacaatacctgatatattcgatattagtaatgtacaccatctttagccaatgagtacttagaagaagaaaacactaaaaaacggaaaattagaagattgctttttaaaagaaatctttcttgttgcacatggaaggtatgaaaataaatggagtaatccccacttagaaactttacaagtaatattaaaacgaaaatttatttatttgttaatggattttgtgttgtaatctgatgattgagagaataaaaatgggaaatgtttgctaaacaaatagacctatgctataatttagaaaaggtcgaaaattgtagaagtatgaggctgtgttattaattgaattttcttttatttaaaaatgttgccgcatttttaaataaaaatatcttttagtcttactaataatttttataactaattgacttttaaaagaataacatagtgtggtaaaaaaatcaacacctattaagtttgtttaaaatatagtaaaaaattacaggaatgttaatttggagtaagacaaacttagacctctatcttttatttcttcggcttaataaccaacaagaaagcaggagatatattggcaatattaacagcaaggtttattaaagatggaatagaaaaggaatatgaaaagagtgatatcacgcccgacttatataatgaaaccttaaaaggttatctctattgtcctactaagaattgcggtgcaagggttatttataattctggtgtaaaaagctttttaagaacatggaatatggataaccatattgacgattgtattcatggttttacgagagctaaaaaaagggtaggtgttgatactactcaatttattaatgttgaactcactgctgagaggaaaaaaagggctttaaaagaagcttataagctatatactatgtctgatgatgaaaagacaatagagaaaacaaagaaaccaaccagaaaaaataatccgactactgttggaaaggaatctgttcccgtgactcacgctgttttacaagatggagatcagcctgaagaggtaactaatcgaaggataggtattagaggaccaaacctccccaaaaggacagtggatatgttaaaggatattgataatggaaaacctcgtttagtaatgggaaaagtaaagagtgtgaaattaatagaatcgatagctgatatcattgtggaagagggtaaaacaaatatccatgttaagtttgaagaagtattcataaataatagtccagcttatttagggttatttcatcacattttaaagtatcaaaaagaaaacaaaaatcaggatattgtattcactgggattggagaagtgaggagatccaaagttaatggagatttagaactttccgttttttatggaactgatttttctatagacggaatggatttaataaagctatcaatgaggaaatcttaaagtagaatttactaagaaagtcgttcaactattcaatgggcgacttttttaattatctttccatgataatgtgaggaaaacatttaaactaaaatttaataatatatggattaactgatttttattcatactcttctaaatgtaaattgcattttatcgagtgatcaataaatgagttactccttctttagacttaaaatttgaggttgctccggcatctgagttttttaatgaagagggaggacgcatttggtgttttaaggagttaaaggtattatcccttgtcggctgtaagtcatcgtacctgtttcacgattagcccgtgtaaaaatgaaaagggcacgaacatgttgatttctataaaaataaaattgaattcaattttattagtcataccttaaacgtctttttatttactcaatcgacattttatgagcagatgaaataagtatttcttgaagtctcccaagcatgatttcgtttagttcaatttgtaggtaagcttctattatcaattctaaatgcaaagatgtaaatgtataacagacccatctctagaaaggcgattctacctaaaaaaacagcgtttgtattggttttcattcttctcttacatattaataacgtcatggttatcttccacggaatttagtctgtttgctgatcattcatttttcaaaatttgttttcatttaaaataatgtttgcggtttgcagtgctaaatgaaataaaaaaagagctcaaggaatcatccctaaacctcataccctcacttcatataccgatactcccgtagcctcttcaaaatagccacttccctcaacaattcctctcccacattcgtttccttcactttctaccgctcaagctctttgtccactaatcgtttcaccgttaagacgtcggtgccggtgatcagaacttctgcctttgagtcaaagtgtttatcagcacctagctgcatgccgtaggagttgtataagagcgtttagccgacaatgcctgttgtggattggcaggctttggagaagccgccgtcgatgacgatcatttttccgtttcctaatgtctaccccgcccaaaaagaagccatcattcaagaatcccccttcaaacaacagcttcttccgcatttcccatatgtcagtataaatccctttgcgtcacggaaacctagtggaaaaggtctctgaaaggagggggcgtatgatgaaaagtgaaaaaattcaaaacaaaacatctttggtttggaagatggcgattgcatctgctgtttcgtgggaagcggcaaaactagttggctctgatcacccctatttagcgcctctttctgttatcttatgtttgcagccaacgatagatcagtcaattcgcttttcttttcatcgtattgcgggaactgcgattgggatcatgctaacgtcctatcttgtcagtcacttgccaatgaatggctggatgctggggctgttcctattaggcggtacttacattgcgaagtggttacgaatagatgtaacggttctacatcaggtagcgctcaccattttgttggtctttacgtttgaacgaaacgctaaagattatgcattcgaccgaatcatcgatacggtgatcggcgtcatcattgccatactggttcacatgttcctttttccgccggactacacaaaaaaggcagcggactcttttcaaacattggctcgtcagctttccggcacactttcagacctttccaaatgggtgcaatcagagtgggggcaaggaaaagggaaccttatggcgtatagaatgaacaatcttctgcaagagctgcatatgacaaaagagatgctgcaaacagcctctgacagcttaaaattcaaccccgtcagaaaaaaacataaaaatatcatttcaagctatcaaattgagatgcaaaagttgaacgccggatttgagtatctatcaaatatagtgaaaacgttaaaagaatgggaaaaagaaggagctttatcttcaagtgacaaaagggagctggggaatgatttacaagtgttaagtgaatactttgcgggctttaaaggcatacaacagggtgaaacagacaattggaaacagaaggaacaggacatgttattggaatctctccgttccgacatgctgtcgcacgcgccgcccggtcataaggtctataaagactcttttttttttagaaacgaaaaaattgctgaaacgtttgtaatgttttctggaaaaaaagaatacggatatacagatgcagatatgatcaggtaaaagcgggggacatgaaatggatgatatacaccggattttggatgtcatcgccaattctaaaaaagctaaggtactggctaccatcattaaagcagaggggtccgcttataagaaagaaggggcttcgatgttgattttaggggataaaacaagagttggaatgttatccgccggttgtctggaagaagatctcgttgaacggtcggaacaggtctgggttgcaggagagccgttgattgtccgctttgatatgagtgcggaggacgatttatcctggggacagggcattggctgtaatggtgttttgacggttttacttgagcctgtaaaaggagaattggaaagacatctgatgacagtcaagacatgcttagatgaaaaaaagtctgtgacccaaatgaaacgattcactaaaacgttagagctgaaggaagatctgtacatagtggaagacggcagcgtgtttggaaccggggatgttatggaacaaggccgtattcaaaaactgagacagacggaaaaggtaatcaagagggatgaacatacctctgatttattttttatccatcagatggtgccaaaaccttgtttatatgtcttcggagcaggggaagatgcgaagccgttagtttcgttggcagctcatgcgggctttcatgtgacggtgattgactggcgtcccgctttatgtcatcacggccattttcctgaagccggccatttgataacaggggcaccggaagaagtcatggaaggcctgagcatgacaaaaagggattttgttgtcattatgacgcacagctttcaaaaagatcagatcattttacatacaataaaaaacgagaatgtgttttataaaggcgttttaggccccagaaggcgcacggagcggctgttaggcggggcagagattccggcagatattcattcccctatcggccttcccatcggggcacaaggccctgaagagattgctgtaagtattgtcggcgagatgattaaagaaatgcgaacacaaaggtctcgcttatgaaaacagcagccatttacctggcagccggtacaagcagacgcatggggacggataagcgaagtttatttctgaatggagtctccctcggaagtatggctcttaaaaatgccttgttatctgaattagatcatattttcgttataacgggaaagggagatccactgcattggctttcggattttttctttttagatcccatatcaaataagtggagtcaggcagaatgtgagcaagcggataagggccaaggccattccatacaatgcggtttacaaaaagcggcagagtacgaggctgacgccgttatcattctccttgcagatcagccgtttgtcaccgcagatatcatcaatacgttaattgattcctatcagaaggagcaccgttatttatttatcgccgctgaaaatcaatatcttcctatgccccccattttattctcagatcaatgttttccagtattgcttcagttaaagggagatcagggcgcccggcatgtcatccgtgaaagtatgatcaatatgggaaaaatgatcagctttcaagaccctttgcttttttatgacgtcgatacagttgaagattatacgctgctgctgaataaattcggggagtgaatgagttggagtatatcgggaagagtgtcattcgaaaagaggcccttgaaaaagtgacgggtaaagcgaaatatacggatgattttcaagaaacaggcatattacacgcaaaaatgctggtcagtccatatgcgcatgccgatattgtgtctatggacttttcagaagcttggaagattcccggcgtgagagcgatattgggtgatgaaccttttccgcttgcaggtgaagaaattaaagacagatcgccgattgcctataaaagggtcagataccatggtgagccggttgctgttgttgtagcggaaaatccaattacagctaaaaaggcagcggatgccatcaaagtatcctataaacctcttcccgtcgtcaattccccccgtgaggcctttcaaaaggatgcgccgctcgtccatgaaaatgcggaccgctatgagaagacaaaaggtgtattcccggttccgaagacaaatatcgcaaacctggataaggttagaaaaggaaatattgaagatgggtttagggaaagtgatgtgacagcagaattccaaatttcctttaacccttctgatcacgctgcgatggaaacaagatgctcgattgttgaaattcgggcggatgaggagattatcattaccacatcctctcaagctccttttgccattaaaaaattaatggagtggtattttggaattgaacccggaaaggtgatcgtcaaaacgcctttagtaggaggagcgtacgggggaaaagcagccgttcagttagaggtgattgcctatttggcatcaaaagcagtcggaggccggcccgtcaaattgtttaatacgagagaagaggatctgatcacatctcccgttcatatcgggttggatgccattgtcaaattaggggctacaaaggatggaatcttaaaggcggcggacattcagcttttatttgatggcggagcgtattctgataaaggagtggacatcagccgggctgcggtggttgattgtacgggtccgtacgcgatcgatcatatacggtgtgattcatattgtatgtatacgaatcatccatatccaagtgcattcaggggctacagccatgctgaagtgttatttgcctttgagcggacgatggatgtattggcggaaaagctgaacatggacccattagaactccgctataaaaatgccattcgccccggtgacaccacaccgactcaagttcttctcaattcaagcacggtcggaaatgtgccgaagtgcattgaaagattgaaggaattaatgaattgggacgagggacagcgaattgaaatcgatggccggaagatacgggcgaagggaatcagctgcatttggaaaacctcaacatttgatacaaatgcaacgtccggggtgattctaacctttaatcccgatggaagcattaatttgatgtcaggggtagtggaaattggaacagggacaaaaacagtgctagcccaaatcttagcggaacgaatgaaaatggatataagcaaaattcacgtaaaaatgcttatagatacacaaacaacacccgagcattggaaaaccgtggggagcagagggacgttaatggccggaagagccgtactgaatgcagcggaggaagccattcgaaagctgaaagacgtggcatcatgtgtattgcgggttcctgtcgaggaattggaagtggccgacggaaaggtttattttatagatcatccttctgtacatgttgaaataaaagacattgcttacggatatacctttccaaatggaaataccattggcggccaaatcattgcgagcggcaattacacattaacccggatgacgaatttagaccgggaaacgggaagagggaagccgggacccgagtgggctgtcggtgctcagggaattgaagttgagttggataaacgggattatacgtatcgaattacaaaagcctattctgttgtggatataggaactgtactgaatgaaaaagctgctaggggtcaagtgatgggggggatgagtatgggaatcgcatttggaggaagagaaacctttgtatttgattcatatggcagagtattaaatcctcagcttagaacataccgcccccttcactatggagagcagcctgaatatatcattgaatttgttgaaaccccgcatgtgattgcgccttatggggcgcgcggcggcggggaacacggactgttggggatgccggcagcattgggaaattgcctttccgccgctttaggtgtccaattgaatcaacttcctctcattcccgaacgattatggaggacgcaagaggggtggaaagatgataccgtttgattttgattattttaaaccgaagaccattcaagaaacaatcaatctatttcactcgcttgcggccgaaaagaaaacaccaatgtattattccggcggcacggaaattatcacgttaggaaggctgaatatcatctatacggatgcggtgatagatctgaacgcgcttccggaatttcaaaccatccgcttttatgaaaatgatttggtgatcggagcgggcgtgtcattaacgaaactggaggaagaaaatccatttccgctattaagtaaaacagtaagtgaaatagccgatcggacgactcgaaataagatcagcctgggcggaaacatttgcgggggcatctattaccgtgaggccgtgctgccgttgctgatttctgatagtttgatagggattgcagggagagcggggattcattaccgtcccataaataaagtatttaacaaggaaatacagttgcaaaaaggtgattttttatttcatgtcgttgtcgatcgagcgtacgttgacctgccatttgtcagtatcaaaagaagacagcagtggaatgtcggatatccattggtgacagtctgtgcgctgaaaaaagatgatgagatcagaatggccttcagcggcgtatgtccatttccgtttcgttctgctgaaatggaggctgtgcttaacgataaaaaccgatcagcagaagaaagagtgcgcaggtctttacagtatgtacccaaacccgttcttgatgatgcagaaggctcaagtgaataccgaatgtttgtcttgcaaaatacaattttagatgccttacgggaattagaaggaggtccaaatgtctgatcctattacgttgaaagtaaatggcgaggaaagacagattacggtcaggccggctgatactttgttatttgctcttcgtcttcgtctcggattaactggtgcaaaaccgggctgcttaaatggggattgcggcgcctgtacggtattaacggacggggtgccgatgaaatcttgcttaatgcttgcggcagaaggggaaggaaaggacattacgacaattgaaggactgatcaatacaccgattcaaaaggcttttattgaaaagttcgcgtttcaatgcggttattgcacaccgggttttctcatgaattgtcatgctttggtgaatactgagccgaatgcaagtgatgacacgataaaaaattggctggagtccaatatttgcagatgtacgggttatagggagattgaagaagcggttaaatccgttttacatacagggaaaccgtaaaaaaagagcccagagaatcatctctgaactccattcttcatttcatataccgatactctcgcagtttctccaaaatcgccacttctttcatcagttcttcaccgacgtttgtttctttcactttcttccgctccagctctttgtcgactaatcgtttcactgttaagacgtcggttccggtgctcagcacttcggccttggagttaaagtgtttatgggcgacgagctgcatgccgtaagagttgtataagagcgtgtagccggcgatgcctgttgtggattggtaggctttggagaagccgccgtcgatgacgatcatttttccgtttgccttgatcggatcttcgccttcgatttcttttaccggtgtatggccgttgatgatatggccgtgatctggattaaggccgaattccttcaggatgtttcggcaggctgcttcgtcttcgcgcaaatagtaatacgggtttttcttttctttatgcgtttccttctctttaatgaaataccgctcaaaggttgtcatggcgcgttttccgaagagggaagagtattcgcctgtccataagtaccaagtcatatctgtcgccagatcttcggtttcttccggatgggcaaacgcttcccgtaagaaccgttcaaatacatcgagcagctctcggcccgcataagctttatcctctatcatcatcgtttccatgctgccgttttcatcgacgggaatacagccgtgaatcagcaggttgccgttatattttaaataaaggctgccttttttcatcataaaattcatatggcggcccagcttttcggagttctgaacagagaacagcagcttgtccatgacttctgcttcttcttctaacagctcgtcaggctgtttaggattcaccgtcgcaaagcaggtgttttccagttgatatgtttttccgttcagcgtgatttcattgcggtcataatcgatcttttccagtaacagccgttcctccatattaaagttcggccgtctcttaataatcgggctctcaagcttgaattggatcatcgcgatcgcctgatgaatttttgtgatttgtttaatctcatcttccggtctgttttcgtccgctttcgggcggaaagacgggttatcatcgtaatatttttcggcaaggttcaatagcggtctcagattgatgccgtaaacgtcttcaataatatccagattgtcatagcgggcacagatgcggataatgtttgccaggcatacttttgagccggaataagcgcctatccagagaacatcatgattcccccattgaatatccactgaatgatagttgatcagttcttccatgatcttatccggctgcggtccgcggtcataaatatcgccgacaacatgcagatggtcgaccaccaaacgctgcgtgctgtaggcaaggccggtgatcagcttatcggcctggccgagcgcaatgatctgttctatgatttcggaatagtattgttctttgttggcggcttgttctgttttgtacagcagctcttcagaaatataagcaaattgggcgggcagcgctttgcgcaatttggagcgggtgtacttggaagaacaataagaaacgagcttaatcatccggtgaatcgtttctttataccactcgtttaatgcctctttcgtatcaaagtcatgtttgatcagcttcagtttgtcctcaggataatagaccaaagccgccagttcatcaatttctctatcgtaaatgacgccgctgaaaatatcgcggatcttctcttttacccttcctgaaccgttccgcagcacgtgctggaatgcctgatactccccgtgcagatcactgacgaaatgctcggttcctttcggcaggttcagtatcgctttcagattaatgatttccgtgaccactttttcttcacaatcgtatttttgtgcgagcagatctaaatatttcgtttccaatctcgtccatcccctttttatttacgagcaattgtatgataaagtgaatttaaagtatgacataatgtttaaatgattagaccttatatgatagtaccgcataacgcctttttgatacaatgaaaacggaaaatacgcgcttcaggcatcaaaaattggaccgggataacgccgtgcagctcatccctctattgacaatgcattcaacttccattaaaataaaaagttagctgataggtgtttctatcagaaactcaatacgtagcaggctatgattgctgtgggtcgaactacagcaggagcggcttctggagagaccgcgggttttccgcggcgccgaagggttcacaatctcaggcaaaaggacagaagagtaccgaatatgtatttgtcatgctgttgattgtcagcggcgcagatataatttgatattcttatgaccatgagattggagggcatccaatctctttttttattggctttttttgctcgtcgttcactagagaggtaaggaggagtcagatgtggagcagcgagagctaaagagggacttatcgaatcggcacgtgcagctgatcgccattggcggcacgatcggcaccggattgtttttagggtctggtaaggcgattcagctggcgggtccttctatcatctttgcgtattttattgtaggtattgcgctttttttcgtcatgcgggcgctgggagaactgctgttatctaaagcgggctaccaatcattaacggatattgccgaggcgtatttagggccgcgtgcagcgtttgtcaccggctggacctactggttttgctggattatgacggctatggcggatgtgatcgccgtcggtgtgtatgtgaaatattggtttgatattccgcagtggattccggcacttatctgtttgctcattttattagggcttaatctgttaacggttaagatttttggagaattggagttttggttcgccttaattaaggtagtcacgattctcgcgttaattgtcatcggtgtggttctgctggtgattgggttcaaaacgcataccggaacggtttcagcggcgaatctgtgggagcacggcggcttgtttccgaacggattttcaggctttttgctttcgttccagatggtgatcttcgcctatgtcggtgtggaattagtgggtgtgtcggcggcggaaacgtcaaatccgaaaaaaaatattccatccgctatcaataaaattccattgcggattttatttttctacgtcggggcattgctcattcttttatgtattaatccgtggatgcagctgaatgcggcggaaagtccttttgtaaagaccttcagtctggtcggcatcccgttagccgcaggaatcattaattttgtcgtattaacgtctgccgcttctgcttgtaacagcgggatgttttcaacaagccggattttgtataacttaagcaaaacgaaacaagcgcctgcaagttttgcgaagctgaataaaaatcatgtgccgagccgcgcattatggatatcggttattgtgctgtcagctggcgctcttttaagcaaattgataccggaagcggcttttggcatcgtgaccaccatcagcgcgatttgtttcatttgggtgtggggcgtgattctggtctgtcatatcagatacaggaaaacccgtccggacttacatgcaagctcgtctttcaaggcgccgtttgcgccgtttatcaattacgccgtgctggcgctgtttgccgtcattctggtgattatgctgtttgcggatgcaacgcgcccggctttgctgctgacgccgctgtggtttattggattatttcttatctatcgggcgagagggagaaagacagattgaattgcttcagacggtgtactgccatgcagtatgccgttttttgttttgattggaaagcgagaatatttgttagaaatcaggctataatgattgtataatttaaaaaagtgtataattttaaattaagcgaggtgatgatatgaagtatgagaagttatctaagcttttttataaaatggatgctgattcatatgagaaagaatttaaaaagagaacaagcagctatggcagttattcaacatcattaaacatacgggggttccgaaaaggccgacccacggacgattcatttgagctattttatgtgaatacacataaactcatgaagctgaataatgaagtgttgttaaacagttccaaaatttcatcccttatcagtcagctccccgaatttgccgtcaaaccttattttgataaattaattattaatgaagcacagagtaataatgaaattgaaggaatccgcagtacaaaaaaagaattgaaagaggctcttaaagcgttagaacaatccgagccctcacataagcggtttgtcggattgatgaaaacatatcaatttatagaccgaattccgtcgtttacaagcattcatgactttagggaattatatgacgagctggtcgcagatgatatcggaacagaagatgcgccggatggtgagctattcagaaaaggctatgttgaagtgaacgatgggaacatgaccacccatatcggcgttaattctgaacagaagataacagaagcgcttgaggctttaattgcttatcttcatgatgaaacacatccccagctgtatcgttacatgacagctcattactactatgaatacattcatcctttttatgacggcaatggaagaacagcacgccttatcgttgggagttatttgtcccgatacttagaaaaatattcagccatcactttttcttacgcagttaataagaacaaagataagtattataaggcattagaggaaattcccgcacctttaaaccggggagagctgactttttatttaatggatatgctggagttgcttctgtcaggacaaaaagggattattgaggatcttgaatttaatttaatgaaactgaaacgaattaggaactatattgatagcgatcaatgggctgattataaagatgaacgtgatatttttaatatcattatcacgattaatgtatttgtaaatgatcaggttacgctgtcggtgcaagatttaatggagctctcaaataaatcgagacataaaattaacagagtaatggattatttagaacagcaaggatttgttgagctggtaagcagaaggccaaaatcttataaaatcagcgaggattgtttagaggaaatactgccttcttaattagtatatgtaaaaaagccgccattcatatggcggctttcacattaattccggatcaaataatcaaatgcgcctaaagcggcagttgcacctgatcccatggagataatgatttggttgtacgggccgtctgtgcagtcccctgcggcaaataggccgggaacgcttgtcgcgccgctcttatcgacgatgatttcgccgatgcggttgcgttcgaccgtttcgtctaaccattctgtattaggcacgaggccgatttggacgaatacaccttggagttcaacgtgtttttcttcgcctgtttcacggtcaacgaacgtaatgccgtttacgttttggtcgcctgtgatttctttcgtttgtgcatttttgtgcacagtgacgtttggcaggctgtaaagacgtttttgcaggacttcgtctgctttcagttcaggcgcgaattccagcacagtcacgtgattgacgatacctgcaaggtcaatcgccgcttcgattccggagtttccgccgccgataacggctacgtctttgccttcaaacaatggtccgtcacagtgcgggcagtatgcaacacctttgtttttgaactcttgctcaccaggtacgttgacattgcgccagcgggcacctgttgaaaggatcactgttttacttttcagtacagcgccgttttcgagttcaagttcgaagaggtcttttttctcaaggcgtttcgcgcgctgaaggttcatgacgtcaatatcataatctttcacgtgctcttcaaggcttgcagcgagcttcggtccttcagtcgctttaacgctgatgaagttttcgatgctcatggtgtcgagtacctggccgccgaagcgttcagcgacgacaccggtgcggatgcctttacgcgccgtgtagatggccgcgcttgcgccggcaggtccgccgccgacaacaagaacgtcaaacggctctttgtcggcaaactcagacgcatctgcgccgctgcccatttttgcgagaatctcttcgatggtcatacggccgcttccgaaagattcaccgtttaggaaaacagtcggaacagccatgatgtttttgctttctacttcttctttgaatgccgcgccgtcaatcattgtatgagtgatattcgggttgagcacgctcatcatgtttaatgcttggacgacatcagggcagttgtggcacgtcaggctgatataagactcaaagcggtattctccgctgatgttcttaatctggtcaatgaccttttgatcagccttaggcgctctgccgctgacttgaagcaatgccagcactaatgatgtaaattcgtggccgagaggaacaccggcgaatgtaacgcctgtgtcttctccggtacgattaacgctgaagctcggtgttctgtttaattcagttttttcaactgaaattttagatgacatggaagccagctcgtcaacgagagccagcatgtccttagaagtgtcatcgtcaccggcgcttactttgagaacaatgtcgttctcaattagctgcatgtattgatttaattgtgctttgatatttgcatcaagtaccaatggaatgcactccttagattttacctaccaaatcaaggctaggtgtaagtgtttcgccgccttcttcccatttagccgggcagacttcacctgggttttgacgaacatattgagctgcttttactttgtttacaaggttgcttgcgtcacggccgataccgcctgcattgatttcaactgtttggatcacgccatcaggatcgatgatgaatgttccgcggtcagcaagaccagtttcttcgtcaagaacgtcgaagttgcgggagatcgtttgagatgggtcaccgatcattgcgtaagtgattttgccgattttttcagagctgtcatgccagcctttgtgtacgaagtgagtatctgtagaaacagagtatacttcaacacctaattctttcagtgcagcgtattgtccttgaagatcttcaagttcagtcgggcaaacgaaagagaaatccgctggatagaagcagaaaacgctccattgacctttcaaatcttcgtttgttacatcgatgaattcaccgtttttgaaagcttttgcttcgaatggcagtacttcttttccgattaaagacataatatcttcctcctgaaatgtgatttgaaatatattaaaaagacaaagcattcactttatctttcaataataattctaattatatatagattattaaataacatttattttttgtcaagctatatggggtattattttctgcttttttttgctttagacgtctaaaaacgcctggtataagcggtttggcgctgtttgtcatgtttagcgccgggcgaaagggggattctcaattggtgaatcgaaacagtaggaatcaacccttctatatggcagtataaaccaaagggggtatgatcatgcaaataaataacattactttgtacagttgtgcgttggaggagacgaaacacttctatgaatgggtgttaggtttttctttaattgatgagtccggtgattcgtttaccatcaaggcgggagaaagtgagttgaaatttaggcgcgccgattctcactctcatccgacgtatcatttcgcgtttaacattccgaataatcgttttgatgaggcgaaggagtggataaaggataaagtcgtttttcaaacggaagatggggaggatgaggtgtatttctctcatattcaggcgcgttccttttatttcaaagatccgtccaacaatctggcggaattcatcgcgagagaaacatcgccgccaagcgcggaacatttttcgattgagtccgttctgaatatcggcgaggtgaatctgacggctgccgaagtcgtatcaaccgggagggagctgcagcgtttcggcattccggtgagaaagcatgcgcctcttagggaaaacgggtttcattttatgggtgattacaatgatggggcgtttttgcttttagggccgagcggccgccgctggattttttctgatcagcatgcggagttccatccgctgtctgttattgtgaacgggacgatccgcattgaggctgacggaaagggcggcattgacatcaggcgggcacagccgtcataaaaaagcccgggctcaaaaggcccggacttggggacattatttatagacaacacgggtgctgcacatgatgtcgtgcagcgtttttttctctccgaaggcgcccatgatgaatccgatataaagaatgagcttagatatgatatatgcgaaagcgcgtccgaaggcctggccgatggaaatccgtccgccatcttcattgacgaccttaaggccgagcaatgcttttcccagggtcccctgcatctttgaggccgtgagcaggctgaaatataagatactgatcacaaaagagctcacaagaatcgggatgacgccgaacaccagaaaagagatgttaaactgattttcggtcatgaaggggtcagccgccgcaacgcctgccgcaaataaaaaagagaccataaattgaatgataaaaatcggaattcctatgatgatttgatcaatgacgtaagccagaaaccgaatccaaaatcctgccggtctttccatgtatctttttctctcccttgctttaatctggaatattatacgtaatcattccaaattttgcaacggagcttaagcttccgcgagcagcctctttccccatgccaagcgtcccatgatcagcccgaaagccagaagggcaaacatgatgccgcaccacatcagctgatggattcccaagtgtgaaataaaccagccgcccgccgccgttccgatggtgatgccgaggttggaaaaagagacaaacaggctgttgccgaattcgggcgcctcctttgcttccgcagtaagccatgtctggctgacaatgagaccgccggaatgaacggcgccccatacgaagacgagaacggccatcggcgcgaaagacgtcccaaacccgtatatgagcaagtaggcggctgtataaagaagcggaaacaggatgacggtctttttcatatttttatataacaaagcgccgaagacgaaattcccggctatcataatcaccccgaagctcatcagcatgaagctgacccatgtgccgttcatatgggacacccgtccgaggtactccgcaaaatagctgtagacagaaaacatggccgcaaagagacaggtgacggcagcgatattgagccacaaagccagtttgcgaaggatgccgagctgacttctgaaagacattttttctgtgaccggcatggatggcaaaaagagaagaatgcccgtgaatgcgatgagactgatgatagcgccgaataagaaggcggcttcaagggagagacgctccgccagataagacgtgaaaggcacgccgaacgcaaagccggcggtgatgcctgaaaagactttcgttacggcttttccggattggccggcggggacaagccgggccgcggccgcaagcgctacagaaaagaacaccgggtggcataaagccggaatgatccgaaacgccagcatgacactgaaatgcgccgtatacgcgtagaccgcatttgaaacggcaaacatcagcaccgccaaaagcagaatgactttccggtttatgcctgaagcaagcaaggtcaaaaacggccccgacacagcgacgatgaatgcgaaaatactgacaagccaccccgcttttgaagcggtaatttgaaatctgtccgccacttgcggaagaaccccgatgatgcccatctcggtcgtaataatcccgaaaacccctagggccaaaaatagaatgaagatggaactgctttttttcattgttatgtatacctccttttataactacatatacagaaaaatagatatgttagaacaaaaaaagccctcctttcatggttatagctggtgctgaacatagtcagcaaaggctttaatttgtttttcattccttctgtaataggtccacttcccgattcgttcagattccagcaggccggctttttgcatggtcagcaggtagctggagatgacggactgcgcaagccccgactttgcctgaatatcaccgacgcaaattccggtgcggaaactgagtccctgatcaagataaggtctttcatcaaaatggtcttccgggtgtttaagccacgtcataatatcacttcgtgttttgttagatagcgctttatgaatcaatatcggttccataacgtttattatatctatttttctggatttgtaaattcgtttttaacaaaacattctcaaagtaactaaatatcgtgctaaaatataacatattatcagattaccggtaaaaaagccgggttattgtcaggaggatattcacatgaatcaaaagaaaaaaggtgcggttgcgatgaccttgctttccgctctgctgttttgtttattgccggtcatcggctcgctttctccgtttgcagaaacggggccgaacgcgaatcgttttaattccgcgggcatgtgggccgccgtcggtcagatcctttttatatatgcggtcccgctcattatgtatattctcggtgttcgtgtcatgaaaatcatcatggccgttttttgcggaatcgggcttctcatttgcgcggctgtctttttggtaacgttattggtcgtaacttcttcggaacaggagctgtctctttattacggccttctcgtttggtcaggcgcggcttttatcgtcaatgtggtgtggtatattgccgcgtttcgatcatccccgaagcatcagcaggctatgtgacatttgttctataaatctgccgaaaatacaaatatttcataggttaattatggtatgatcgaagtgatatagcagcttttaatagaaacgggaggaactaacattgaaaaaaaagacagcttcattgcgaatgaaaacattggcggccggcgctgcggttgctgcggctttatctgtgggagcggtttctgatctgccgggggcaaaatggctgcatccggcggctgctcaagctgcggaaacggtatttaaacaaaatcatgcggcatccggtttcttggcgggacggtatgacgcgcaggcgatgtctccgacgatgttcaactggtcaagagaaagccggtttacaagcactgccgatggcgcgttaaaatgggaaaagaatgttccggccaatcctcaaaacggtgcgggagccgcggttgacagggacggcaccgtatttattcaatcaaaagacgggaagctgacggcgtatcatccggacggtactgtgaaatgggtgacggaaaacctcgggacgacctatacgctgactccggtgctcggaacaaacggtgtcatttatcttccttctcacgataaaaaactatatttcatcgacaaagaaaccggaaacattttaacatcggttccgctgagcggagcgcctagttccgatgcggctatcggctctgacggcacgctgtatgtgtcgacgctggataactatatctatgcgattaaaccgacgtcgccttcgacatggacgcaaaagtggaagtttaaaacaaacggcgtggtcggttccgctcccgtgttagcatcaaacggaacgctgtatacggcaacgtacaataatatcttttacgcgatcaattccggaacgggccaagtgaaatggtcaaaaacgacgtccaacgggtttaaaggctatccggttattgatagagacggcaccgtttacgccggaaaccaggacggcaacttatacgcctatacatcaacgggtgctgtaaagtggacgttcccgttaaacggtttctccagctcttcattagcgatcgaccataacggcaatgtgtatatcggttccggaagcggcgagctgttttccatcagcaaaaccggcaatatgaactggtctttctatacggacgggcctgtgagaacggcgccgctgattgatgcggacggcaatgtgtacttcggttctgacgataaaaatgtctatgcggttgacgctgacggtaatgaaaaatggcgctatcaaacagacagcaatgtcatttcctccccggttctggctgaagacggcacgctttacgtcggcacttatacgaaactgctcgcattcggggcaaaaaaataataaaaaagaatccgcgtcatctgcgcggattctttttttatttagaggcttgtataaatacgcctttttcatgagaaaattctttaaagccgtacacaccgtgatatgaaccgatcccgctcgtattgacaccgccgaacggaaggttgacgtcagtgaaatgaacgacgacatcattgacagaagcattgccggatgtcgtatgctgcagcacataatcgatcagctcctgattatggctgaatacatacaaggcaagcggcttgtcccgttcagtgatgtaatcaacggcttcactgatatcttcgtaattcataatcggcagaatcggtgcgaagatttcttcctgcatgatcttcatatcaggcgtgacgtttgtcagcacggtcggagaaatcgtgcggtcatgcgcatcgaatacgccgccgaacgccgttttcgcccctttttcaatggcgtcatcatacagggctttgacacggttaaagttgcggtcgttgacaatctgcgtgaatttgttgcggtcaaccgtatgatcatcctccataaaacctgcattgacaatggtttgcaggagatctgtaaaggtgctctgcacttctttcttcataaggagatagtcaggtgcgatacatgtttgccccgcattgacaaatttgccgacggcgatttttttcgccgcgtccatcaaatcatagtcgctgtcgatgatcgtcgggctttttccgccaagctcaagcgtgacggacgacaagtgcttcgctgctgccgtcatgacgattttaccgacattcgtgcttccggtgaagaaaatgtggtcaaacggctggtcgagcagttctgtggcgacatcgacctcaccttcaaaaatggcgacttcttcttcgtgaaatgcctcgcgaataactgtcgcggcgatatggctcgtctccattgtaaaatcggacagcttcacaatcgcgctgttgccggccgcaatggcagctgcaagcggagccatcgtcagcataaacggataattccacgggccgagaattaaggtaaggccttttggctcgtacattaatacgccgtcagcgtcgggactgacggatgagccgacgcgtttcggcgccatccaggtgtcgagattgttcatattatctttaatcgccttaatcgttccctgcgtttccgctctttttacctcatgataaggcttgcggacgtcccgtctgatcgcctcgatgatttcttcttcatgtgcggtgacggcatctaaaaagcgctgaagcttttctctgcgctgcccggctgttgaagcacgcagcgttttttgattttttttctgaagctcaaagacgcgtttgatgtctgcttttatatgctgatccatcggtcttcctcctctggttgcttttttgtttcttcagggcctattataatgtggtgtgtttttgcggcaaagacagcgtaaacacatctatacgttaccgtacaaattgcggtgatctgtctaatgaaaggagtgtctcttatgccggattctgtgacaactgacatcaaacaagcgcttttggccatgcttggagagcgggatatccgccgtgtgaccatgaaggacatcgccgaacgggcgcgtgtgagccgggggacactgtacctttattacgaagataaatatgcgattttagaggatatagaggaagaaatgaaagacgggctgagcgaagcgctgtatgattcactgaagaataaagatgtgcttcatttacatggcggatggcaaaaagtgcatccgaccctgtcttttgttgaccggcatcgggtgtttttccaaacgatgatggatcgcaataaaatgccctattttcactttcatgcttttttaaaagatgtgttccggcatgatgtgctgctgtcaccggtcaattcggatttctcaccgactgaacaggatatgtacattcattaccgcgctttatacacgtatgccattgtgttgtactggctgaatgaggagcccggggcatccccggaagcgatcagcggacaggtgtgggatttgatttctcaaaaacggttttactggctgttcggccgccgggtgccggaacaagaagaaaaaaagcccgccgaccgccgggtgacaaggacgaggcaggccttgcaagaagccatgatcggcttaatggcggaaaaaaaagagtacgcggcaatcacgatttccgatattgcccgtcaaagcaacctccgccgtgccactttttatgaccattacgccaacaaagaagcattgctgaaaacgatcatccatcaatcatgccgggatctgatcggattattgacggtaaaaggagagcctgccgactgttccatggaagaagcggaatccgcgctcgtcggtctcttttcggcgctgtcggacggcctgccgctcgttcattttctgagagagggttcgggagtgcctgacgtcatcccggaaatgttcagagcgctgcaatcgttttatcttcatcagcccctgcacattcaggcgggcaaaaaactctatgcatattatgtcgcgtccatgctcgccggtttgattcaatatcgtcttcatgaaggaaaagaccacgcgccggatatgctggcccgggagtttctgcagtttttggatgtaaagaagtatcgggtgattttgctgtgaggatgatgaaaaagaactcagccgaaagggactgccccccgtttttgagacaggggtcaaaacaccttttaaacagccaattgccgatagtttatcggtgattggttgtttagtttggtttgaatacgaatattgttataataatgaatgtattctatgacagtgcgttctacgatggcagtcgtagttcgatcaatgctgttaagatagaacgtttcagactttagcgaggaatgaaacgattcgatggaggcattatcagcgggcgtccctttgcgggacatgctcatggtaatgccttttgttttaacagctttttgatactcgtaagatgtatacacagaaccttggtcactatgtaacacgcagttctcaggcagcattggtagctgatcaagtgtgtctaagacaaaggctgtgtcctgcttatccccaatagtaaaagcaatcacttctccattgtataaatctaatatactggaaaggtacaattgtttctgtccataaggcaaatatgtgatgtccgttactagtttttcaagaggacgatcagactgaaagttccgatccaatatattatcgaccacggcatatggctgcccatccttcttgcgctttttcaccttaacccgacactgccattgatttttctgcataatacgttgaaccgttttatggttaatacacattctcttttttagtatggctgtgatttttcgatatccatatcgatacttgtgctctcggcacaacgtgccgatttgtttttccaaatggcgcttgggatgatccttcatcagattcttcttccaacgataataagacgctcgagagatacctaaatgaatacagatatcctgtacggtcattgtgctgtgcaatatttctacaagttcgactgacgtttcgctatcaacttcctttccaattcgttgtacttttttaaaacttcattctgttgtctcaggtaacgaatctctgcctgcagtttctctaaatcggaagaatactccggaccttttccgtaagtgtattgctttccaacaggctgttcgaatcgatgtgtatcaccagccttataccatctaacccatgtctgaacctgtgtcttattcttaatattcaactcctgcaggatctctttcataggtacgcctgccaatctcatttctacagccttctgtttcacttcaaccggataactcactcttgtccccatagaaaaaacacctccaagtctaatttcggataacaatcatccgtattcaaacttgaaggtgtttttatttgtctcatcttatggggtcagtcccgaaaacaggccgggttcttttttgctgttttctctttgagaagcgccgatatgaagtgtccggctttatcccttataaaaaagataccttccatatgacgcctgatcagcattctgccgccaaacatgacaaatgtcatattcggggcatgatggctgctactacaaaagcgtctggcgccccgttatacttgggatcataatgaaaaagaagggacatgacattcatgaccaatcacaccgcaactcaaaaacaagcatctttaaaaaagcaggttgccgcattttccggcgccgatacaaagcatagtgtcaatcagcttttcaacacgtttgtgccgttttttgccctttggtttcttgcttacttcagcctcaatgtctcctatcttctgaccctcgcctttactgttatagcagcgggatttttgacaagaatctttattattttccacgactgctgccaccaatcctttttcaaacaaaagaaactgaaccggctgttcgggtttatttcaggtgtgctgaccctgtttccgttccttcaatggcagcgcagccactccattcatcatgcgacgagcagcaacttagataaacggggcaccggcgatatttggatgatgaccgtcaaggaatacaacgaagcctcagcctggacaaaagtacgctacagactttatcgcaatccgtttattatgtttattctcggcccgatttacgtatttctgattaaaaaccgtttcaatgtaaaaggcgcccgccgcaaggagcgctggaacacctatttcacgaacgcggcgattgtcttattggctgctgcgacgtgcctgcttgtcggctgggaaaactttttgcttgttcagggtccgattttccttatttcggggtcaatcggcgtctggctattttatgttcagcacacgtttgaggattcttattttgaagccgatgagcattgggattatgtgcaggccgcggtagaaggaagctccttttacaagcttccgaagcttttgcaatggctgacaggcaatatcggctaccatcatgttcaccacttaagcccgaaagtgccgaactacaagctggaagccgctcatgaggggcacgagcctttaaaaaacgtgccgaccattacgcttaaaacaagtcttgaatccatgaaattccgtctgtgggatgaggacgaaaagcaatttgtcacctttcgggaggcgcggaaaaaaccggcgccccatccggtaccgaaagaacctttgaagaaaaatgcctgatatggcgcgcggctctttctcttatcagaaagggccttctcttcatgcgtgaggatgcaatgaaggcggtgttttgataaagtgatggtagacacaagcagcagaaggtggaacaaagatgaagaagtattttaaatttcaaaaactgaacgggatttctccttatatatggacgatttttttcatcttgcctttttattttatttttaaaagctcttctacctttgtcatcgtggccggcatcattttcacacttgttttctttggcgcataccgcttcgcatttgttgcaaaaggctggccgctttacttatgggcgcttcttctgatcggcatttcgaccggctcagttatgctgttcagctatatttacttcgccttctttatcgcctacttcatcggccatatccgagacaaagttcctttttacatcttatattacattcatatcatcagtgcggcagttgccgtcaacttcagccttgttctgaaaaaagggtggtttttgacacaaattccgtttatcgtcattacactgatcagtgccatcctgctcccgctcagcattcgaagcagaaaggcacgggagcgccttgaggagaaattagaatatgcaaatgagcgaatcgccgatcttgtgaagctggaagaaaggcagcgcatcgcccgggaccttcacgatacacttggacaaaagctctccttaatcggattgaaaagcgacctcgcccgaaagctgatatataaggaccctgaacaggcccgcactgagctgaaaagcgtgcagcagacggcccgcacctcgttaaatgaggtcagacaaatcgtctcatcgatgaaaggcatccgattgaaggatgagctcggcaatgttcggcaaattcttgaagcggcaggaattgattttgtgtatgaagaaaaagaagcgcccaaacatatctctttgctgaacgaaaacatcgtcagcatgtgcattaaagaagccgtcaccaatgtcgtgaaacacagcggcgccaaagtatgccgcatcaccattcagcagctttggaaagaggttgtcattacggtagaagatgacggcagctttcaatgcaaagaagaccgctttttttcaaaggggcacggcctgcttggaatgagggaacgtcttgaattcgcaaacggcagtttagccattgatacagccgccggaacaaagctgaccatgagaatcccgaatgattcaaaatcaaaagaaaaggatggtagcagatgatcaacatcttcattgccgaggatcagcaaatgctgctcggcgcactcggttcgctgttgaatttagaagaggatatgacggttgtcggtaaaggcacaagcggccaggatgccatcgatttcgtggaaaaacatgcgcccgacatctgtctgatggatatcgaaatgcccgggaaatcaggtcttgaagcggcagaagaactcaaggacagcggtgtgaaaatcatcattttgacgacctttgcccgctccggctattttcagcgggcgctaaaagccggcgtcagcgggtacatgctcaaggacagcccgagcgatgagctcgtcagcgccatccgcagcgtcatgaaaggaagacgcgtctacgcccctgaattaatggaggacatctatagtgaagaaaacccgctgaccgaacgggaaaaagaggtgctcgagcttgtcgcagacgggaaaaacacgaaagaaatcgcaaacgccctcagcatcaaaagcggcacagtccgcaattacgtttcgatgatcctggataaattagaagtgaaaaatcgaattgaagccattacccgatcaaaagaaaagggctggtttaagtaacctgccctcagcttgttcagccagtgtttttgcactggcttgtttctttttcgccgtcactccgtctcttccttccacttcttatcaatcagcatttttcccggccaagtgtatgccatgatgccgccgtctgcggtgatgtcttctcccgtgacgtaagaactgtcgtctgaagcgaggaagagcgcgacggctgccatttcttccggttttccaagccggccgagcggcgtgatccatttgttggcttcacggaacgcctcgcccatttcgtcttctgtcgtgcctgccaatttatcaatgagcggcgtttcaatcgtccccggcgataaggaattgacgcggattccgcttctggcgtaatcaatggccatcgctctcgtcaggttcgtgattccgccttttgcggcgttatagcctgagcggtcaaggtctgcggcccggccggacatggaggaggtgttgatgatggagcctcctttttcgagcatgagcggaatcaggtatttgctgcaaagaaatgtgccgcgcagatcgacggcgatgatccggtcaaacaggtcgaccgggtattcatggacttttccgccctcttggtcaacaccagcattgttaaacagaatatcaattgttccgtactttcgctgaatgctgtccgcaaaagactttacgttttcttcgtctgatacatcaaggtgaaaggcttctgcttctccgccgttttttctgatagcgctgacggtttcattcagttcgctttcattgatgtcaccgcagatcacgcgggcgccttcatcggcgaaaacccgtgccgtcgcttgtccgatgcctgtcgcggcccctgtgatgattgcggttttgtctgttaatcttcccatattgcgattcctcctttttttatatctgttcccgctgaatagggggataaacatacggaggtctgtttctaaatacctattaaatatgttaatattatgtatatacatcattgggaggtttacatattttgaagatacagcataagaaggagatagcgttttattgttatgccattgttcctatgggatttgtgatttacaccgttatctctattctatttcaggacatcatatttcctctcactgtaagaaatgttcttcatgagtctttgcgaaacttgggatctcttatcttatttagtttgtttttctatccgtcatacatatggatgaagaaggaattcggccgccggaaagaagcagagaggagaggatgatcaacattctctcttttttattgataaaatgggtgaaatgaatccattaacatgttaaatttacaatatatgcatctgctaatcctagttgacaattgtcactgtatatgataaatagatgctgaaaagattttacataacatcaaagcataattaaaggagagatctgaagtgcggaaaaaaaagtttaaagcagaatccaagcgattgctggacatgatgattaactccatttacacgcagaaggaaatttttctccgcgagttaatttccaacgcgagcgatgcgattgacaaaatctattacaaggcgttaaccgatgattcattaacgtttgatcaagacaattactacataaaagtgacggcggacaaagaagcgagaacgctcaccgtcacagacaccggtatcgggatgacaaaagacgagcttgaacagcatctcggcacaattgcgaaaagcggttcactcgctttcaagcaagaaaatgactcgaaagacggccatgacattatcggccagttcggcgtcggattttatgcggcgtttatggtggctgataaagtcacggtgaaaagtaaggcgctcggcagtgacgaggcgtatgtatgggagtcggaaggggccgccggctacacgatcgcgccgtgtgacaaggaaaccgtcggtacggaaatcaccctacaaataaaagaaaacacggaagatgaaagctatgatgagtttttagaaaactaccgcatcaaagcgatcgtgaaaaagtactctgattttatccgctacccgatcaaaatggaagagacggtcaacaagccgaaagagggcagcgagaacgaatttgaagaagttcaggaagaacagacggtcaacagcatggtgccgatctggagaaaaaacaaaagcgagctgacagatgaggattacgaggctttttacgccgagaagcattacggctttgataaaccgctgacccatgtgcatatcagcgtcgatggagcggtgcgctacaattcgattttgtttattccggaaaacatgccgtttgactattatacgaaggaattcgaaaaaggattggagctgtattccaacggcgtgctgatcatgaacaaatgcgccgacctgcttccggaccatttcagctttgtaaaaggcatggtggattctgaggatctgtcgctgaacatttccagagagatgctgcagcacgaccgccagctgaagctgattgcgaaaaacatcaataaaaaaatcaaagccgagctgaagagcctgctgaagaacaaaagagaaaaatacgaatctttctatgaatctttcggcagacagctgaaattcggcgtctataatgatttcggcgcgaataaagacgtattaaaagatctgcttctcttctattcatctaaggagaaaaagctcgtcactctggacgaatatgtgtccagaatgcctgaggatcaaaaatatatctattacgcgtccggcgattcatatgagcggattgaaaagctgccgcaaactgaaatggtggcggacaaaggctacgaaattttatatttcacggaagatattgatgaatttgcgatcaaaatgctgacaagctatgaggaaaaagagttcaaatccgtatcaagcgccgacttaggcatcgacagtgatgaggatgaaaagcagactgaagccgaagagaacgaatataaagacctgttcgaaagcatgaaagagattcttgcggataaagtaaagaacgtcagagcgtcgaaacgtttaaaatctcatccggtctgttttgcgacagacggcgaagtgacgatcgaaatggaaaaagtgttgaatgctatgcctgacagccagcaggtcaaagcggaaaaagtgctggaaatcaacccgaatcacgaagtgtttgagacgttaaagaacgcgcacggacaagatcgggaaaagcttgcattatacacaaatcttctctacaatcaggcgcttctgattgaagggctgccgatccatgatccggtcgaatttacgaatgacatttgcaaagttatggtatgacgccaaaaaggaatcgcccagcgggggcgattcctttttttattacagtgtgcgctgtttaagaatttgattttgtttgctgcgcttctttaaggagaaccgttttttcaagtgcgtttcgatttcttctaaacttctgcccttcgtttcaggaacgatgtaagcggcgaagaagaaggatgagaggcaaatgactgagaatattccgaatacccagccgatgcccatggcgctcagcataagcgggaataccagtgaaacgatcaggttggttgccgacagaatcaatgtcgtaaatccggttgcggctccgcgtgcgtttgacgggaacagctccggcatcagaacccatacgacgggaccccatgtcgcctggtagaagacgatatagatgccgagaaacagcacggtcagccatgctgttgaagctgacaggccggccagaaggagaatggctgatagtgacgccaggctcaaggtaatgccgacgcttccccacatcagcagttttttccggccgatccggtcgattaagatcatggcggtgatacacatgatgacgtttaagacaccgatgcccatcgtgccgagaacggacgccgaagtgccgagtccggcctttgtaaagatggtcggcgcatagtaaatcactgtgttgataccgaccgcctgctggaagatggcgaggccgatcccgatcagcagcataggacggatccattttgctttcagcaagccgagcgtagattcttttttctcggcttctccttgtttcatttccgccaattcaacggcgatatcctctttgtcgtgggtcatttccatgacttgtctggcttcctgctcacggccgcgtttgacgagccatctcggagattccggcataaacgcgattccgattaataaaagcgccgccggtactgcggcgagaccgaccatccagcgccaagcttcaaacggggtgaatatgtaattcacgatatatgcgagtaaaattccggttacaatcattaagttattcaatgtgccgagcgttccgcgtatttttgtcggcgccatctcagatagataaacgggaaccagcgccgttgagcccccgacggctaacccgagaatgacacgggagataatcagcatggtgacggtttgcgaagccgcacaggcaagcgcgccgataataaaaatgagtgaaaggacgaaaaccacttttctccggccccatcggtcagagcatgtcccgcttaatgcggacccgaaaatcgcaccgagcagcagcatgctgacgaccaatccctcggtcagcgtgtttaaaggaatatcattgttaataaataacaaagcccctgaaatcacaccggtgtcatagccgtaaagcagcccgcctaatgctccgaaaaagtaaatcaggtattttttggtgtttttcttcacagatgatcctcctcatcttttggaacgcataatagtttatttagataactatttcattccccgaagagaaaaatataaacataaaaaaacacgcccctttaagaggcgtgtttttttcttaggaaaacagcttgtcgataaacgcgatttcttcagcagatagcgtaatggaggctgctttcatgttgtcttttaattgatccgcgcgtttggcgcccggaatcaggatatcgatttcaggtctcgccaagtaccaggcaagcacgatatgcgccgtatcggcattgtgcttttcggcaatcggtttgagctggttgacttttttgatgttttctttaaactgctccccttggaaatgcgcctggtcattgcgcaggtcgccttcagggaaggttgtgttctcgtcgtatttgccggccagcagtccggatacgagcgggaagtacggaatgaatgagatgccgtgttctgtcgtataagggaagaaagtcttttccgcctcacggttcagcaggttgtattctccttgaatcacatcgactaagccgtctttattggcttctttcagctgctccaaagagaaattggatacgccgatggaacggatttttccttcttttttcagctcattcaacgcttgaacggcttcgtccttcggcgtgtgctcatccgggaaatggatgtagaataaatcgatgtaatcagtctgcaggcgtttcaggctgtcttcgaccgattgtttcaaaaaggccggtgaattgtcgaaaacaaagtcatcgccttcttttctgtgagcggcttttgtggcgatgaagacatcctcgcggttgcattctttcagcacctcgccgattaattcttcagaacggcccacaccgtaaatataggcggtatctaacatggtaacgccgcttttaatcgcttcccggaccaattcttttcccgtttcttcattcagattcggatagagattgtgtccgccgaccgcatttgttcccaaaccgatcggaaatacctttaggtcagttttgccgattgttactttgctcatgttttcgccccctgaaaaaattggatatcatagcggctgccggaaaaatacggcagcgttctctattaactataacgctatgccaagtgaatgtcgatttgatgctcttggcaatacttcgtatattcctcatcgagctgctgagaagtgacaatgctgtgaagccggtcgaaaggcgcgtatgtcaaaagcgtggatttgccgaatttggaatgatccgcgagcagatacacttcgttcgccttttcggaaattctctttttcacctcgtattccagtaagtcggaattcgtcaggccgtgggtgatcgttgtcccggtagcggacatgaacgccttgttaatgttgtatttattgagtgtgctcggatcatcaatgccgacaaacgacctagtcttccgtttgtagttattgccgatgatgatcaggtcgatatttttcatggatgaagcggcgttaataatatcaaggctgttcgtcaaaaccgttacattcttatcgggatcaagcgtctccagcatcgatttggtcgtcgtgccggaatcaataaatacaagatcgtgatcctcgataaaccgtgacgcatagcgggcgattttgattttttcatcctgatgttgaatggtgcggttttcaaaagggacgagcacagatttttcggctgacgtcacgccgccgtatacctttttgataacccctttttccgcaagcttattaatatcgcgtctgaccgtgtttttagagacattgaatacctcgcacagctcatccagcgaagtggctccgtgtttgagaatgtattcttccatctcctgaatccgcatcagtttcataaaaaaactccttctagaattcttaaagtaattaaaatatataataaacaccagaagttaatcaatagttacttaacaaatgattaaaaagagagttcacgccgtacgattcgacacggttctccaagttcctgttttcccgatcaaaaaaagtatgataaaaataatgaaaaaattttgattttttagattgacttgaagatgtgttgggcttacaatgtaaccaagaaatgaccaaaacataacctgtaaaatcaaaagtgaaagatgtaaccgtttgctttttccggtacatgaccaacttttacatggaaagattgggagtcaccatcattttagcatttgtaagcgtttaattcatgtcttttatatgtaaaagatgaatatattcatccgttattatccagctgaacaggatgtttactatttaaggaggcaatgagaatggcagagatcagaaaactgaaaaactacatcaatggtgaatgggttgaaagtaagacagatcaatatgaagacgttgccaatccggctacaaaagaagtgatgtgccaggttccgatttctacgcgggaggatgtggaatacgccgtccgctcagcgtcagaggcgtttcaaacatggtcaaagacggcagtgccgcgccgtgcaagaattctatttaactatcagcagcttctccagcagaacaaagaagagcttgcccgtctgatcactttggaaaacggtaaaaacacgacggaagcactcggtgaagtgggacgcggaattgaaaacgtcgaattcgcagcgggcgcgccgtcactcatgatgggcgattcactcgcctccatcgcgacggatgtagaggcggcgaactaccgctatccgatcggggtggtcggcggtatcgcaccgttcaacttcccgatgatggtcccgtgctggatgttcccgatggcaatttcgttaggaaatacgttcattctgaagccatctgagcgcacgccgctgttaacggaaaaactggcagagctgtttgaacaggccggtctgccgaagggcgtcttcaatgtcgtgcacggcgcgcatgacgtcgtaaacggcgttcttgaacatccggatattaaagccatctcattcgtcggttcaaaacctgtcggcgagtatgttttcaaaaaaggcagcgaacatttgaaacgcgtgcaggcgttaacgggcgcgaaaaaccatacgatcgtgctgaatgacgcccaccttgaagatacggtcgcaaacattatcggcgcggcattcggttcggcaggagagcgctgcatggcatgcgcggttgtgacggttgaagaaggaatcgccgatgagtttatttcgaaattacaggaaaaagcagcggacatcaagatcggaaacggactggatgacggcgtgttcttaggcccggtcatccgcgaggacaacaaaaaacgcacgcacagctatattgaaaaaggcatcgaagaaggagcgagacttctttgtgacgggcgtgaaaacgcaacggaagacggctatttcgtcggaccgacgatttttgacaacgtgacgacggatatgacgatctggaaagatgaaatctttgcgcccgttctgtcggtcatccgcgtgaaaaacttaaaagaagcggtggacatcgccaaccagtctgaatttgcgaacggcgcgtgtctgttcacttcaaatgcgaacgcgatccgctacttccgtgagaatattgacgcgggaatgctcggcatcaaccttggcgtcccggcgccgatggcattcttcccgttctctggctggaagtcttctttcttcggcacattgcacgcaaacggaaaagacagcgtcgacttctatacacgtaaaaaagttgtgacggcacgatacccgtctcctgacttcaattgatctgacagccggcccggacggctttgtgattccgtccgggttttcttttaccatccattaaggaggaataaacatgagtcatttgctgcgcaaaccgcaggccgatgagatttctcaaggcgtgaacatcatacatgacgtcacttcagccaattcagacctcaaatacgtcggatttaaagtcgttgacctcactcccggttccacatatacagaggatttgaaaaagacggagtgctgcatcgttgcggtaacgggaaaaatcaccgtcactgattatgatcagacatttgaaagcatcggcacccgtgaaagcgtatttgaaagaaaaccgacggatagcgtttatgtgtccaatgaccgctcttttgaaatcacagcggtcagcggggcgagggtcgcgctgtgctattctccgtccgaacaccagcttccgacaaagctgattaaagcggaagacaacggtgtggaacatcgcggcaagctggcaaacaaacgaaccgttcataatattctccccgattcagatccatcggcaaacagccttctcgttgttgaagtttacacggacagcggcaactggtcgagctacccgcctcataaacatgaccaagacaatctgccggctgaatcctttttagaagaaacctattaccatgaaacggacccgccgcaggggtttgtcttccagcgtgtgtacacggacgaccgctcgattgacgagacgatgaccgcagaaaatgaaaacgttgtcatcgtaccggcgggctatcacccggttggtgttccggacgggtatacctcttactacctgaatgtaatggcgggaccgacacgaaaatggaagtttcataatgatccggcccatgaatggatcctggaacgctaacaagtgaggagtggcagataacgatgaaatatacgtttaatgaagaaaaagagtttgatattgtcgcgatcggacgcgcgtgtattgatttgaacgcggcggaatacaaccggccgatggaagaaacgatgacgttttctaaatatgtcggcggttccccggcaaatattgcgatcggcagcgccaagctcggattaaaagccggttttatcggcaaaatcccggacgatcagcacggcagattcatcgtttcttatatgcagggaaagggcgttgatacgtcacaaatgaccgttgacagagaagggcgcaaagccgggctcgcttttacggaaattctcagtccggaagagtgcagcattctgatgtaccgggatgacgtggcggatttgtatcttgagccgtccgaagtcaatgaaggctacatcgcaaacgcgaaaatgctgctcgtatcaggtacggcgcttgcgaaaagcccgtcgcgcgaagccgtcttaaaagcggtgcatatcgcaaaaaaacatgacgtaaaagtcgtgtttgagctcgactaccgtccgtatacatggcaatcggcagaagaaacagccgtgtactacacgctggtggcggaacaatccggtatcgtcatcggtacgcgtgatgaatttgacgtaatggaaaaccgcagcggcggaaataacgatgaaaccgtccgccatttgtttgcgcactccgctgaccttgtcgtcattaagcacggcattgacggatcatacgcatacagcagatcgggagaagttttccgggcgcatgcctataaaacaaaggtgctgaagaccttcggagcgggtgattcctatgcgtcagccttcatctacggacttgtcagcggccgggatattgaaacggctttaaaatacgggagcgcttccgcttccatcgtcgtcagcaaacacagctcctcagaagcaatgccggctgccggtgaaatcatcgaactgattgaagcgcagcacagtcttaacggtaaatagaacgtataaaaggtgggatcgtttgtgggtaagacaattcgcttaacgacagcacaagcgctgattcaattcttgaaccggcagtacattcatgttgacggaaaagaagagccgttcgttgagggcatcttcacgattttcggccacggaaatgtgttggggatcgggcaggcgcttgagcaggacgccgggcacctgaaagtctatcaaggcaaaaacgaacaaggcatggcgcatgccgcgatggcatacagcaagcagatgctgagaagaaaaatttacgcggtatcgacatcggtcggtccgggtgccgctaacttgacggctgccgcgggtacggcgctggccaatcatattccggtgctgctgcttccggccgatacctttgcgacgaggcagcctgacccggtgcttcagcaggtggagcaggaatacagtgccgccgtcacaacaaacgatgcgttaaagcccgtgtcccgctattgggaccgcatcacccgccccgagcagctgatgagcagcttaatccgggcgtttgaagtgatgacagatccggcaaaagcgggtccggcgacaatctgcatttctcaggatgtagagggagaagcatttgattttgatgaaagcttctttgaaaaacgcgttcattacattgaccggatgcagccgagcgagcgtgagctgaaaggcgccgcggagagaattaaggagagcagccgtcccgtcattttagtgggcggaggcgcgaagtactccggcgcgcgtgaggaattaatcgcgctttctgaaacatacggcattccgcttgtcgaaacgcaggccggcaagtcaacggttgaagccgattttgccaacaatctgggcggcatgggcatcacgggcaccctcgccgcaaacaaagccgcccgtcaggctgatctgatcatcggtgtcggcacacggtacacggactttgcgacatcctcgaaaacggcgtttgattttgacaaagcaaaatttttgaatatcaacgtcagccgcatgcaggcttacaagcttgacgcgtttcaggtcgtagccgatgcgaaagtgacgctcggcaggctgcacggcttattagacggatataaaagtgcattcggcacggcgattaaagattggaaagatgaatggctcgttgaacgggaccggctcggcaaggtcacttttacacgtgacgcgttcgaaccggaaattaaaaaccatttctcacaggatgtgttaaacgagtatgccgacgcgctcgggactgagctgccgcagacaacggcgctgttgaccatcaatgacacgattcctgaagacagcgtcgtcatcagttcggcaggatctcttccgggggatctgcagcggctgtggcattccaatgtcccgaatacgtaccacctcgagtacggctattcctgcatggggtatgaagtatcaggcacgctcggcctcaagctggcccatcccgacaaagaagtctattcactcgtcggcgacggaagctttctgatgctgcactcagagctgattaccgcgcttcaatataacaaaaaaatcaatgtcctgctttttgacaactcgggattcggctgtatcaacaacctgcagatggatcacgggagcagcagttatttctgcgagttccgcacagaggacaatcagattttaaacgttgattacgcgaaggtggcagagggctacggcgctaaaacatacagagccaatacggttgaagaactgaaagcggcgcttgaagatgcgaaaacgcaagacgtatccactttaattgaaatgaaggttctgccgaaaacgatgacggacggctatgacagctggtggcatgtcggcgtggcggaagtgtcggagcaggaaagcgttcagcgggcatacgaagcgaaagagacgaagctgaagtctgcaaagcagtactagaggggaggcatcacgatgggcaaacaagatattctgtggggcatcgctcccattgggtggcgcaatgacgatatgccggaaatcggagccgggaatacgctgcagcatttgttaagcgatattgttgtcgccggctttcaaggtacggaagtgggagggtttttccctgaaccctccgtcctcaataaagagctggctctccgaaacttgcggattgcggggaaatggttcagcagctttatcatacaagacggtattgaaaaaatggctgaacaatttacagaacactgtgattatttgcagaaagtcggagcggatgtcgccatcgtttctgaacagacgtacagcgttcagggcttggacattgatgtatttaaggaaaaaccgcacttctcagatgaagaatgggatatgctgtgccaaggcttgaaccgtctcgggaaaatcgctggcgaatacgggctggacctcacgtttcatcatcatctcggcacaggcgtccagacggcggaagaagttgaccggctgatggatggaacggacccgcggtatgtccatttactttatgataccggccatgcctatatctcggacggagactatatgacgattctcaacaagcatatggatcggatcagacacgttcatttcaaggacgcccggtttgacattatggagcggtgcagacaggaaggcaagtcattcaggcagtcgtttttacagggcatttttacggttcccggcgacggatgcatcgattttaccgaagtataccgaacgctcgtccgtcatgattattcaggctggatcgtcatcgaagccgaacaagacccggcagtcgccaatccgcttgagtacgcgctgattgcaagaaagtacatcgacagtgaactgcttgatcctgcaaattagagggggacttatatgaatagtgccaaggcggaatcagctttcagcaaaaggaccatcgccgcagcattagcaaattacattgatgcaggttccatcgtggcaggatcagcgggtttatctatgtgggtcagctacttgaagctgtccgacagccagatcggattgctcggcgccttcagcgcaaacgcgatatcagcggccatcggagcgctgctcggcgggtatttggctgataaggtcggccgaaaagctgtatacacaaacagtatgctcgtctacgccttaggaatttgtttggttttgtttggatttaactttcccatgctgttatgcggatacatgattatcgggatttctgtaggcgcggatattacggcttcatggaccattatcgcggaaaacgcccctgagaaaaaccgggcgaggcattgcggagtggcgcaggtggcgtgggccgcaggagccgttgtggttctgctgttatccgttttggtcggtgacctcgggcttctaggaaataaaattgtctttgcgcatctattggtgatcgccctgatcacatatgtgataagaaagcgtttacctgagtcggatgcctggaaaaacagtgaagagcggcctgccgccgtgaaaaaaacatcttattttgacctgcttcagccgaaatttttcaagaacattttgtttttaatgggtgtgtttctcgtatggaatctcgccgcgggcgtcatgggattcttcatgccgtacatctaccagcaggtcggcggcgtatccgcaaatacggccaacattctgcagatggccctgtttatcttcaccgggctcggcgtcgcctgtatcttcatgccttttgcagataaatatcggaaaacggtgttcggaatctgcgcatgtatggccgttgtcggctggtcgctgtttttactgccgtttcaggggctcccgatgctgcttttgtttgttttagcgatcggcatcaataacggagccggccagcaggcgaactaccagctgtgggcaagcgagctgttcccgacagaacacagagcgtcagcacaagggctcatgttctttctcgtccgtatttcaatcggaatttggagtttatttgtgccggtcatcatgtcacaattcggcatcggttttatggccggtattctgctcatatgtgtgacggccagtatgatcatcgggcttgtcttcgcgccgaatacgtccggcaagtcgcttgaacagatacaggaggaactgtacggcgctcctcaggacggcagcgggaaaagaaagacgagaaccattatttgattatcagaaggagtggcgatcaatgaatttacgtataggtgttatcggaaccggtgctatcggaaaagagcacatcaaccgcatcacaaataagctgtccggcgcggaaattaccgctgtcacagatgtgaatcaggaggccgcgcagcagaccgttcaggatttcaatttgaacgcctccgtttatcctgatgacgacagccttctcgctgctgaaaatgtggatgccgtcttagtgacaagctggggcccggctcacgagtccagcgttttgaaagcgattcagcacagcaagcacgtgttttgtgaaaagccgcttgcgacaacggcagaaggctgtatgcgcattgtcgaggaagaaatgaagacgggaaaacgattggtgcaggtaggtttcatgcgcaggtatgacagcggttacgttcagctgaaagaagcgattgacaaccgcgtggtcggcgagccgctgatgattcactgtgcgcaccgcaacccgacagtcgcatcgaattattcaacggacatggccgtcatcgatacgctcgttcatgaaattgatgtcctccactggctcgtcaatgacgactatgaatccgtacaggtgatctatccgaagaaatcaaaaaatgcgctgccgcatctgaaagatccgcagatggtcatcatcgaaacaaaaggcggcatcgtcatcaatgccgaaatctacgtgaactgtaaatacggctatgacattcaatgtgaaatcgtcggggaagacggcattatcaagcttccggaaccgtcaagcatcagcttgagaaaagaagggaaattcagcaccgatattctgatggactggcagcgccgatttgtggctgcgtatgatgtggaaattcaagacttcattgattcgatccggaataaaggcgaagtcagcggtccgacggcatgggacggttatattgccgcggtaacaactgacgcgtgcgtaaaagctcaggaatccggacagaaagagcctgtggcgctgcaagagaaaccggcattctaccaatcatttacgactgtgaacaaataatagatcgggagtgaaagaaatgaaactggccttagatccatccatgtaccgcgatgatttaacgttagaagaaatggtctataaaacggcggaactcggatacgaatatatcgaactgtctccgcgcgaggatttttgtcctttctataaatatccgaaagtcgattcagcaaaaatcaaacaattgaagcgccttttaaaagatacaggtgtgaagctgtcctctcttcttccgctttaccactgggcgggtcctgatgaagaccgtcgtcaggccgccgtgcgcaactggaaacgggcgatcgaaattgcggttgaacttgaagtggatttgatgaacagtgaattcagcggttcaaaatatgatccgttgacaagtgaagaaaaatttatcaaatccatggatgaactgctgcccgtctttgaaaaagaaggcgttaaactcaatctgcaggctcacccgtacgattttatcgaaacgcacaaaggggcgatggatatgatccgcgcgcttgacaaggattggatcaatcttgtctactcgactgcgcatacgttcttctatgatgacggaaaaggcgatattgcgaccatgtttgatgaagccggcgaccgcctcacacatgttttatttgcagatacttttaatcataaagcggcgcatggcctgcgctacatcgtcaacccgcctgacgcgaaagtaacggttcaccagcatttggacatcgggcaaggcgaggttgattttgaaacgattttcagaaagatgagagagatgaaattcgacggaattgcgacgaacgccgtttttgcttgggtcggcgaaagagcggatgaatcaagccggaccacgcttaagaaattaaaggaagaattaggtatggcataagctgagtacggagttcggcggagcggggcaaacaagccctccagccggactcccttcatatcgaaaacgcggatgggagaggctgacatgaaactttgctttaatgaagcgactacgctggagaattcaaacctgaaacaggatttagaactgtgcgaaaagcacggctatgattatattgaaatccgcacaatggataagctgccggaatacttaaaagaccattcactggccgatctggcggaatattttcgcacccatcacattaaaccgcttgccctgaacgcactggttttcttcaacaaccgtgatgagaagggctatagggagatcatttcggaattcaaaagcatgatggaaacctgcaggacgctcggcgtgaaatatgtggtggccgtgccgcttgtgacagagcggaaaatcttgaaagaagagatcaaaaagagcagcatagaggtgctgactgagctttcggacatcgcggagccgtacggcgtaaacattgcccttgaatttgtcggccacccgcaatgtacggtcaatacatttgaacaggcgtatgacatcgtgaacgctgtcggccgcgataatgtcggactggtgtttgacagcttccatttccacgcgatgggctccaatattgagagtttgaagcaggcggacggaaagaaaattttcatctatcatatcgacgatacagaagactttccgatcggctttttaacggatgaagaccgcgtctggcctgggcagggtgcgattgacttagacgcccatctgtcagcgttaaaagaaatcggattcaatgatgttgtctccgtagagctgttcagacctgaatattataagctgactgcggaggaaacgatcaaaacggcaaaggaaacaacggaagccgtcgtatcaaaatacttcatgaaggaggcgtgaacatggcttttgtcaccatgaaacatcttcttgcagaagcgaaacgggagcattatgcagtcggccaatttaatatcaacggcctccaatggacgaaggcgattctgcaagcggcgcaaaaggagcaatcgccggtcatcgccgcggcttccgatcgtctggtcgactatttaggcggatttaaaacgatttccgccatggtcggcgcgttaatggaagaaatggcgattaccgttcccgtcgtgctccatcttgatcacggaagcagtgcggaacgctgcagacaggccattgacgccggcttcagctcagtgatgattgacggctcccatcatccgattgatgagaacatcgcgatgacaaaagaagtcgccgattatgcggctaagcacggcgtctcagtagaagcagaagtcggcatggtcggcggcatggaagacgggctggtcggcggggtccgctatgccgatgtcgccgaatgtgagcggatcgtcaaagaaaccaatatcgacgcgctggccgccgccctcggctccgtccacggcaaatatcaaggtgaaccgaatctcggatttaaagaaatggaggctatctcccgcatgactgatattcctctcgttcttcacggagcatccgggattccgcaggaacagatcaaaaaagccatcacgctcggccacgcgaaaatcaatatcaacacggaatgtatggtcgcctggacagaagaaacacgccgcatgtttcagaaaaacggtgatctgtacgaaccgcgcggctacatgacacccggcattgaagccgtggaagagacagtgcgaagcaaaatgagagagttcggatcagccggtaaagccgtaaaacagcaggtcggctgatgagaacggaaaccgccaagatggcggtttttttgtgcggtgttgcgcccgtacgcccgaaacgattatgatgatggcagcagtgtaagaaacgggagtggttcagtttgaataaaatcatgattgtggaagatagtgaagacattcgcggactattgcagaattaccttgaaaaatacggatatcaaaccgtggccgccgcggatttcacggctgttcttgatgtttttttgcgggaaaagcctgatgtggtgctgcttgatatcaatctgccgtcttatgacggctattattggtgccgccagatccgccagcattctacaagcccgatcattttcatctctgccagaagcggggaaatggatcaagtgatggcgattgaaaacggcggagatgattatatcgaaaaaccgttttcctacgatattgtgctggcgaaaatcaaaagccagatccggagggcgtacggagagtacgccgccaagcagggagagaaagtggttgaatatgccggtgtgcagctctttgtagaacggtttgaactgcgctttcaggacgaaaaaagcgagctttctaaaaaagaaagcaagcttttggaagtgctgctggagcggggagaaaaggtgacgggaagagaccggctcatggaaaaaacgtgggacaccgacattttcgtcgatgataatacgcttaacgtgtatatcacgcggctcagaaaaaaactgcgggagctgaatgcgcctgtttccattgaatcggtgcggggcgaaggctaccagctgagggcgctgtcatgaagctgtttctccggtctcatgccgtgctgattctgctttttctccttcaagggctgtttgttttcttttattactggtttgcgggtcttcattctttttcccacctgttttacatattgggcgtgcagcttcttattttggcgggatatcttgcctatcgctggtacaaagaccgcggcgtgtatcattggctcagctcggagcaggaagggacggacatcccgtatctcggttcttcagtgttttgttcagagctgtatgaaaagcagatggagctgacccggatgcagcaccagaagctccatgagaccgaagccaagcttgacgcgcgggtgacgtatatgaaccaatgggtgcaccaagtaaaaacgccgctgtcggtcattaatttaatcattcaggaagaggatgagcccgtctttgaacaaatcaaaaaagaggtccggcagattgaattcgggctggagacgcttctttattcttcaaggctcgacctgtttgagcgggattttaaagttgaagcggtttccttatcagagcttctccaatcggtcattcaaagctataaacgattttttattcaataccgcgtctatccgaaaatggatattcgcgatgatcatcagatttacaccgatgcgaaatggctcaaatttgcgatcggccaagtggtcacaaacgcggtcaagtattcggcaggcaagagtgacagacttgagctgaatgtcttccgcgatgaagacaggacggtgcttgaagtcaaagattacggtgtcggcattccctcgcaagatatcaagcgggtgtttgacccttattacaccggcgaaaacggacggcgtttccaagaatctacgggaatcggccttcatctcgtcaaagaaattacgggcaagcttaatcatacggtggacatcacttcgtcctccggtgaagggacatcggtccgattttcatttcttacaaaaatgtaaggctgcgttaagaaaacaacatagctcgttttgtttccccttgataacatggatttatgtcaaggggatttttatgttaaatgccccggcactacatgaaagcagcccagaccaacaagaataaaatcataaggaggattttcatggcgaatatgcttgaagtcaaacatataaataaaacctataaaggacaagtgtcctatcaagctttaaaacaaatttcgttttcaatagaagaaggcgggttcacggcggtgatgggaccgtccggctccggaaaaacaacgcttttgaatatcatttcaacgatcgaccggccggattcaggcgatatcctgattcacggagaaaacccgcaccggctgaagcggacaaagctcgctcatttccgccgcaagcagctcggatttgtgtttcaggatttcaaccttctggacacactgacaatcggtgaaaatatcatgctgccgttaacgcttgaaaaagaagcgccgtctgtcatggaagaaaaactgcacggcatcgcggcaaagctcggaattgaagacctgctcaacaaacggacgtttgaagtatccggcggacagcgccagcgggccgccatcgcaagagcggtcattcataagccgtcactcattctggccgatgaaccgacgggaaaccttgattccaaagcgtcaaaagacgtcatggaaacgatgcagagcctgaatcaggatgatcatatcacggctttgatggtgacccacgatccggttgcggcaagctactgccgccgcgtcatctttataaaagacggcgaactgtttaatgagatttaccgcggggaaaaccgccaagtcttttatgagcagattcttgatgtgctgtctatgctggggggaaacgcaaatgacctttcttcagttcgcttataaaaacgtcacgagaaacaaaagggcctatcttgctttctttttaagcagcgctttttccgttttgattttctttacctttgcgatgttcctgtttcatccggcactaaaggaaggctacctgaataacatcgccagaaaaggcttaaccgctgcggaatggatgatctttgttttttctttcttatttgttctgtattcggttaacgcatttttgaaatcgagaaataaagaattcggcatcctgctgatgcagggtattacgccggtgcagctgagaaagctcattacggcggaaaacatgatcatcggcgtcatgtcgatcgcagcggggattatcggaggcttcattttttcgaaaacgttctttacggtcggcgcttatattttagaaatggacgcgctgcctctgtacatgccttggaaagcgctcggcattacggccggcggatttctgctcttatttttccttttatcgcagttcacgatcctttttgtcagatcaaatacggtgatcaaattaataaagggcactgacaagatcaagccggagccgaagccgtccgtgcttctgtctatattcggcatcgcctgcctgtgcggcgggtacggcatggttctgaaaggcaatgtccacgggactcaaccgttcatcattttactgcttaccgtcatcggtacgtatttctttttcagccaaagcagcatctggattctgcgcgcgctgaagaagtggaaaaccttttatctgcgcgggaaaaatgtcatttgggtttctgatcttgtttatcgtttaaaagacaacgcccgcctgttctttatcgtcagcattatttccgcggtagcgtttacggcgacgggcgtgctcgcaatgtacaaatcgaccgtcggggcggaagagtccgcttatgagatggagtatgtatcttacagcaataatccaaaagaacagactcatttgaaagatattgaccatgaactgaaaacacacggctttacgtataagaaagacaaaataaatgtttcctatattcgctatcaggaaggagatactgttccgcctgtttacatgatcagcgaatcggaggcggcgaagtacttccatgtcaagctaaacggcctgaaacatggcgaggccgtctatttcccgggcacgtatgaccggaatttcaaaaacgaagcgccggatcagctgaagctgctgaaccaaaaaggcaagccgtctgaccaaaaactgtcggtaaaagaagtcaaaaaaccgctgatctcattgaatgccatcatcgcggtgaacgatcaaacctttgatcagctgaaatcactcggtgagaaagcgtcattatacggctacagctatgatcattggaaagacagtcttgggatcagccaatccttgaaaaatgagatttacggcaactatatcgacgtccattctgattttatggcaaaagccggcacctactatgatacggtgcagctgccgagcctgagtttattcatcggcctgtttatcgcgatcgtcttctttgtcgcggcagcaagtttcttatatttcaggctgttcaccgatttagatgaagacagggagcgctaccgttcattggccaaaatcggcctgagtgagcgtgaaatggcacaaagcgtgacgatacaattggcgattttgttcttcttcccatttgtcattgccgtcatgcatacgctgtttgccttgagaacattggccgtggaaggctattccgatgtagcggggccgctcagtctgaccatcggagggtttttcatttttcagcttctgttcttcctcacagtgcggtcaagctatttgaaaaaaatgaacaagtaaggggagtgcacagatgaaaaaagcattggcaatcctggccgtcttggcggccgctgccgtcatatacggacttctcttttttcataacgatgttacagacagatttaatccgtttattcaccagcaagatgtctatgtgcagattgatcgagatggcaaacatcttagcccgggcggtactgagtatacattagacggatacaacgcatccgggaaaaaagaagaagtgaccttttacgccgcgaaagaccttcggaagaacgcgtatttgaaggtgaaggcgaaaggaaagtatgtcgagacctgggaagaagtcaggtttgaagatatgccgggctccgtacagtcaaaattaaagtgaacaggaaaaacggcacagtgtcatgactgtgccgttttttttattttttattttcttcagcccgtttgatcagcatgtcggtgatgatatccatctgtttgctgacggcaatcgggtcatacggatagaaggtgttgaaatcgttgataaagacacgattgtgttttacggcatcgagatttttccaaacggatgaatctttcagacgctcaaatgttttgctttctccattcggattgtaatcagtaatgaacatataatcagccgcatattgagggatgacctcttgggaaacctgtttcatggcgcctgttttcatgatgttttttttaattttggccggcgctttcaatccgagcgcgttataaacggcttggccgccgcggccggaattgtcattgaaaacccagatctcgcctttatccgtcgtttcataaaggccgactgtctcgtctttgccgatcacgtttttgaggcgcttttgattcgcttcggcttttttgttgaagtctgccataaagcttttggctttatccttcgccccggcaatgtcgccgaataggctgaccgtatctttcgtattctttgcggtgttaaaaggaatgacaatcgtcggtgcgattttcgatagtttctcgtattggtcttccttcatcagcacgattaaatcaggcttcagctgcatcactttctccacattgacgggattgccgatgtcagtaatgtttttcagctgttttttgataaacggatttttgaaagtccatgagcccgccccgacgacatttgcgtcaacggacagcagctcacccgcataaaagtcagtgacgatccgtttcggatgtgcgggtatgtcaatatttccttttgttgattcatatgtacgcatgtctgtctttcctttgcctgatgccgatccgttgttttccttcgcgccgctgcaagcgcttaatgcgaaaacaagcagaagtgccaggccgatcagccatgattgtttcttcataatgatccccctatttaagtgataatgattatcattattaatatagcaggaagacgtcattccgtctatgttttttatagaaaaccttccttgattatccatgttatagtagtaaaggaggaatgaatgttgattacgaaaagagggacttggtgggaagtgctgcacagctggtggctgctgctgactgctgctgacttttgcgctgaccgctttcttggcctttttctatatcggctaccgggctaagaacaaaaaatggctgaaatacggacttatctattttattattttagcaattgcttttgtgctgccgagcacgccgggcgtgtatatcgtgctgcctttatgggtcatctccatcatccacgggctgaaagtgcgggcggcttatttgatacagcttgatgtgtttaaacaaaacgtcgaagcaagagcgtttgaagcggtaaggcatgaggcggaagcaaaattcggcggaaaacccgctcatcgcattgatctgacaaaacagagataaaaacaaatgacaaagccggtatctcgcgctttgtcatttgcatgaccggcctattgctggtatgaatgctgctgaaacggtgtgtgatgctgtgtttgcgggaatgaagaaacattagcgtttgccatcggtgcaggcatgtgtccgcttacttcctgctgaagctgattgcacacattcacgatttgctggcatttctgaatggccgcttcatgcccctgcagcgcttgctgaatggtatgaacggcatgctgttcatggttaagcatctgctgaagcatttgaatgttttgctgttcctgctggagcatttgcttgtactgctgactgctttgctgtgtctgctgaataagctgctgtgctgtttggcggcattgctgcagctgatttccgctgtattggttttgatacatcatgaaaacctcctggagtgattgattttacacatttatcatgtgaaagaataggagaggcattcatgcaagaaaaggattcaaatatttacctgttatatacagagcggaatacaaggctcgggatggcctgtcgagctttgtattccggccctttttctcagaagccgccttctgtagcgtgaaaaggaatattgagtctgttttcgactgcgcgcaggcgctgattcaaacggtttaagcggcgggtatggatttcaatggactggctcagccgtctgatctgctcattcatacgcgtgatttcccggttttggcgctggtcttcttgtgagaggcgggtgagctctctcgtttgctcggcgttttgtctttcaagctgggcgactctccgttctaaacctgtcggctgccgctcttcggactgagggggcgcataataatagctttcctgctgctgatacggctcatactcaacgcggttcacttcgtattcctgctgctgagggaaataggcaggcggggtgtagtactgatatgggttcattcatcattctccttatctagtgaagtctttatacactatgtagtcaattgcacagtgccacggcatccgcctaagttacaggcgtaaaaaagcttcaaaggaaggtgatcatgttgcggaacatacggattttcatcatgacggttcttgttttcggatgcgtcatgataacaggctgctcgcaaaagaaagcagacgatacccctttttattacgggacatgggatgcagggctgaagccgggcccgatggacggggtcagatctgaaaccgtcacgtttacgaaagacagcgtgctgacaaagcaggtcattcaaggccgcggcgaggttgccatgccctcagatgtgtacaaggtgatctcacaaaacacggacgggacgatcgagattgaatacctcggccatccgcaccccgtcaaaagcacgttgaaaagaggaaaaaacggtacgctcatttggaagatatacggagaaacaaaaacaatgacaagaataaaaaccggcggggaggatgcacatgagaaataaggctgccgacagactcgttttgacgggtgtcatcgtacatatcattcaatggttttcactgttatggttattttttatgctttttgatcagttcgggcgttttaccatttacaatcccaatgtcgtcaacggaagcatgcagtctttttcattctttgatatgatgcgcgctcttctgttttccggcacgctgcggaatacgctcctgctgtttctgtttgcggcaatgctcatttacttgtgggtgaacgctctgtttatcctgctggaaatcgtttcttatatcatgatcaggcggaacagccgttcattatgggcatactttcccgcagcgatgggaataaagcttgcccttctggacatagcggccgtccctttctttgcggcggggctgatgctcttgaagcagaaaacagatgacggcggcgaacaagctgacaaggggaaaagacggccccgcatccggaggcaggcccggtatacgaagagaaggcggagaaactcgtccgtttgatttttcattgaaacgaaaaagcgatatgatgaaagcataagaagaaaaggatacaaaggagatgcaggatgtacaagttaatcgcaatagatatggacggaacactactaaacgatcatcatgaagtgacggctgaagtccgcggggcgcttgatgccgccaaagcggaaggggtcaatatcgtcctgtgcacgggccggccgatcggcggcgtgcgtcggtatttggaagagctgaacttacaggaagaaggcgactttgtgattgcctataacggcgcactcgtccaaaatacgtatacaaacggtgtcgtggccgagcagtcattaggttatgaggatttgaagtcgctttacgagctgagcttacagctggatactccgatgcattactttgacacagccaatctgtacacgccgaaccgggatatcagtgaatacacggtatacgaatcatacattacgaaagtgccgcttcatttccgcacgatcgatgaagtgccgaaggatattctgattccgaaagtcatgttcattgacgatccggacaagctggagaaagcgatcgcttccattccggaatcattcaaggaaacatacacaatggtcaaaagcgcgccattcttccatgagattcttcacccgaaagtcagtaaaggaaacgcggtcaagctgctggccgaaaaactcggcattgaacagaaagacgtcatggcaatcggcgataacggcaacgacatgtccatgattcagtgggccggctgcggtgtggcaatggccaatgccatcccggaagtaagggagattgctgattatgaaacgaaatcaaataacgaacacggcgtggcgcatgcgattcaggagcttgtgctgaaaaaataggcaccccatcagagggtgcttttttaccgcgtgttttggtgatatgataagcggagaggggaggcgcgacatggatcgtgaaaaacagcagctcagcatagaagcggcaaaactatattatcaatcagattacagccagcagcagatcgccgaacggcttgatctgtcacgccccaccgtttcaaggctgcttcagtacgcaaaggaaaaagggtatgttcaaattcgcgtcatggacccgtttgaggatctggacgaactcggcgcgaagctggaagaaaaatacgggctgcttgaggcgcacgtcgtcttttctccaagcgacgattaccaggccattacacattacttaagccgctatggcgcagactatatgcataaaaccgtaaaggacggcgatatactcggcgtaagctgggggacgacgatgtaccagatcgcaagccgcatggagccgaagcaggtaaagagcgttgaagtcgtgcagctgaaaggcggcatcagtcattccaatgttaatacgtactcgtcagaaacgattcagctgttcgccgaagcatttcagacgatgccgaggtatttgccgctgccggttatatttgacagcgccgatgtgaaacagatggtcgagcgggacagacatattaagcggatcattgaaatgggcagacaagccaatatcgccctgtttacggtcggaaccgtccgggatgaggcgctgcttttcagactcggctatttccgggaagaagagaaacaattgctgaaagcacgcggagtcggcgatatttgttcgcgcttttttgacgaggaaggcaggatttgcagcagcagcattaacggcaggacgatcggagtcgagctcagcgacttgaaaatgaaagagcgttcgattctggtggcgggcggcagcagaaaatgcaaggccattcacggtgccctgaaaggaaagtacgccaacgttttgattaccgatcagcatacggccaaaaaactcattcaagaattgtgacaattcatgaacataatttcaattaccaatttacatatgttcaaaattcggttattctaaacgtatcctaggaaaaaggaagtgcatacaatgtcaattgcaagtcaaatagaccatactgctttgaaaccgcatacacaaaaagcggatattttacaactgataaaagaagcaaaagaatataaattcgcttccgtttgtgtaaacccgacttgggtcaaactcgcagcggaggaactgaaaggcactggagttgacgtttgcaccgttatcggatttcctctcggcgccacgacatcggaaacaaaagcatttgaaacgaaggatgccatctcaaaaggggcaactgaggttgacatggtcatcaatatcggtgcattaaaagacggcgatgatgaagcggttgaagctgatatccgcgcggtagttgaagcatctgataaaaaagcgctcgtcaaagtgatcatcgaaacatgccttttaacagatgaagaaaaagagcgcgcgtgccgcttggcggtatccgcaggcgcagatttcgtcaaaacgtctaccggtttttctacaggcggggcaacggctgaagatatcgctcttatgagaaaaacagtcggaccggacatcggggtcaaagcatcaggcggcatcagaacaaaagctgatgttgacagcatgatcgctgcgggcgcgagccggatcggcgcaagtgcgggcgtctctatcgtgagcggcggagacagcggcagcagcgactattaatcagcagtgcggaagccgaaagcttccgccatcctctttctttgttgatgcataaaaaattgtaagcgaatacaaataaaaggagaacacatatgaagtatctcatcggaattatcggaatcattgtgtttttaggtcttgcctggcttgccagcaacggcaaaaaaagaatcagaatccggccgatcgccgtcatgctcgtgctgcagctgattctcggttatattctcctcaacaccggtatcgggaattttcttgtcggcggttttgcaaaaggatttaactacttgctggaatatgcatcagaagggattaactttgtattcggcgggcttgtgaatgcgaaacagacgacgttcttcatgagcgtgcttctgccgatcgtctttatatccgctttaatcggaattctgcagcattggaaggtcctccccttcatcacgaagtatatcggtcttgcgttaagcaaggtgaacggaatggggaaaatcgaatcttacaacgctgtcgcatccgcgattttagggcaatcagaagtctttatcagtttgaaaaaacagctcggttatcttactgaacagcgcttatatacgctttgcgcgtccgcaatgtcgacggtctcaatgtcgatcgtcggttcttacatgatgatgctgaagcccgaatacgtcgtgacggcgcttgtgctgaacttattcggcggatttatcatcgcttctatcatcaacccgtacactgtcagcaaagaagaggatttgatcgtcgttcctgaagaagaaaagcaatccttttttgaagtgctcggtgagtatataatggatggattcagagtcgccgtcgtcgtagcggcgatgctgatcggatttgtcgcactcattgccctggtcaacggcgtttttaatgcggtcttcggcattacattccaggcgctgctcggatatgtattcgcgccgtttgcgtttttaaccggtattccgtggaatgaagcggtgagcgccggaagcattatggcgacgaaaatggtatcgaatgaatttgtggcgatgcagacactctcatccggcgatttccatttcagtgcgcatacacaggcagtggtatctgtattccttgtctcattcgcgaatttctcctctatcggaatcattaccggtgcggtgaaagggctgcatgaaaaacaaggaaacgtcgtcgcgcggttcgggctgaagctgctgtacggcgcaacgctcgtcagcttcctgacagcggcgatcgtcggattgattcactgaacataaatgaaggacaggtgatagatcatgagaatggtagatcttattgtaaaaaaacaaaatggaaaagaacttacaacagaagaaattcaatttttcgtaaaaggatacacggacggaagcatccctgattatcaggcaagcgcgctggctatggcgatttactttcaggatatgacggatcaggagcgcgccgatctgacaatggcgatggtgaattcaggagaaacgattgatctctccgccattgaaggcattaaggtcgacaagcactctacgggcggggtcggcgacacgacaactctcgtactcgcaccgctcgtcgcggcgctcggcgttcccgttgctaaaatgtccggccgcggtctcggccatacggggggaaccattgataagctggaagcgatcgaaggcttccacgtggaattatcaaaagatgaattcatcaagcttgtgaaccgcgacaaggtagccgtcatcggacaaagcggcaatttgacgcctgccgataaaaagctgtatgcgctgcgtgatgtaacgggtacggtgaactccatcccgctgatcgcaagctcaattatgagtaaaaaaattgccgccggagcagatgccatcgtgcttgacgtcaaaacgggcgcgggcgcgtttatgaaaacggatgaagacgccgtgaacctcgccaaagcaatggtccgcatcggaaacaacgtcggccgccagacgatggccgtgatttctgacatgtcgcagccgctcggttttgcgatcgggaatgccctggaagtacaagaagccattgatacattaagaggggaaggccctgaagacttaaacgaactcgttctcacgctcggcagccaaatggtcgtattggcgaaaaaagctgagacattggaagaagcgagaacgaagctgcaggaagtcatgaaaaacggcaaagcgcttgaaaagttcaaagagttcctaagcaatcagggaggagacgcttctgtcgttgacgatccgtccaaacttccgcaggcggcgtacaaaattgacgttccggcaaaagaagcgggtgtcgtttcagaaatcgtcgctgacgaaatcggcgtcgcagcgatgctgttgggcgcgggacgtgcgacaaaagaggacgaaatcgatcttgccgtcggcattatgctccgcaaaaaagtcggtgacaacgtcgaaaaaggcgagccgctcgtcaccctttacgccaaccgcgaaaacgttgacgacgtgaccgccaaagtctatgacaacatccgcatctcagaaaaagcggaagcgccgaaactgattcatacgctgattacggaataagagaagaaaggcacatacctcatcagtatgtgcctttttttatggcatggttttatccaaatgaatgtcacggacggattgtttcggctgtttctttctcaaaaaacgaatgagatagcacaggatcatacaaggaattccgcagaagagggcgattctttgattgggatcaaatgcaaggcctacgcatgaagcgaaacataagatcacagcggcgatcggaacgagagggtataacggtgtgcggaaggtcagatccgagacgcgtccgccgtttttcacataatgttttcgaaataacagctgagacagggcgatgctcatccacaccacgacgccggcaaatccggctattgccacgagcaccacgtagaccgtgcccggggcggcgatgcttgagatcaaggatatgcaggaaacggccatgctggcgagcagagcattcagcggaatgcctttcggcgtgacttttttgaaccgggcgctgatcatgttttcattcgcaagagaccacagcatccgggtggaagcatacagtccggagttggcgaccgaaagcaaagccgttaaaatcacgaagttcatgatatctgcggcgtatgggataccgatttgggaaaagaccgcgacaaacggactttcaatcacaccggcttccttccaggagatcagtccggacagcacaaaaatggcgccgataaaaaagatgaccgttctccaggcgacatttcggatcgaacgcggaatatcttttgccggattggcggtttcacccgcggtaattccgatcagctccgtccctgaaaaggcgaagcttacggaaatcattgcgatgaaaaccgcaagaaagccgttcggaaacagcccgccgtgtgaggtgaaattcgacagcatcggagcttcacccgaaccgtgcaatgaaatcaaaccgaacatcgcggcgccgcctaagatgataaataaaaggatggtaacgattttgacgcttgaaaaccaaaactccgtttctgcaaacaatttaacggagaatgcattggcggcaaaaaggagagccgcgaaaatcgcgctccacatccagacgctgctgtggggaaaccagcgctgcatgaggataccggaagctgtaaactccgatcctaccgtcaccacccaattcacccaatacatgataccgaccataaagcccgtggacggcccgataaacgttgtcgcatacgtttgaaatgaaccggtcacaggcatggctactgacaattctccgagacactgcatgacaagatacatcatcaagccgccgatcaggtaagcggcgatcgtcccgcccggcccggcctggctcaatgtataccctgtgctcaaaaacagccccgtgccgatgacccctcccaatgaaatcataaataagtgcctgcttttcatcgtgcgctttagctgattgccgccttgatcaacatccatcgtgatctccccctttttgcgtggcgtgagaatcttccggcagccgagagcacgcgtgccggatttgattttaacgtgacaatttaaatccctttaatgcatgtaaaatgacgtgtgcggctgcccggcttgtcatatcgcgaaaatcaagtgtcggatcaacctcaacgatctcaatacccgagatgtcagcctcctgggctaaaaacctgaccgcctgaagcagttcctcggtatacagacctccggggccgatcgcgggacagccgggcgcatgagcttgatccagcacatccatatcaaccgaaataaaaatggcgtcggctcttttttgaacggccggcaagacctcttgtatcgttcggaggagccctttctcccggatcatctccattgtatgcacgtctgcctgccgttcttttacatattgttcgtatgccaagctgttgctgaactccctgatcccaagctgaatcaggttttgtccgcttatgatattttcatctaacagccggcggaatggcgtgccgtttgtcggtcctccgtcttctgtgttgcggacgtcgtggtgggcgtcgaattgaaagacggctgttgttcctttcgtttccgcaatggctttaatggtggaataactaatggagttgtcgccgccgagaatgacgggcacccagtcaggctggtccgtcagaatgtcatgaatggtccgataaatgtgttcgtgagatgtgacgacatccgtgacgtgaatctgaatatcgccgatatcgtaaagatggtcaatgacatgctcccgcagctccgcggaataagcggaaatcccgccgagcgcccggcggatcgcaccgggtgcaaagcaggcgccggaatggctgattgacgacttagaaagcggaacgccgatcaaagccggccctttgatcgtttgtcccgcccacgcttccgtcacatcgccgatccttgtcacatggcggtcgttgaagagggagccggctttttgcagaaacggatacttatccaagagcggctccctcccttgagacaaccgtctttccattcttgatgacacggcggacatgattgacgccgtaatgatacgggatatacatgtaattcggcgcttcccaaatgacaatgtcagccgcccgtccggctttaatttgtccggcctcttcgccttttccgatcgcatacgcggcattaacggtgacagcgtgccagatttcttccgcggtcatttttaaatgaagcgcggcaatcgacataatgagctggagattttccgtcggtgagctgcccgggttgaagtcagtcgccaaactgacccgtacgcccgcatcaatcatctcccgggctctcgcataagtgtgtttgccgagatagaaagtcgtgcccggcagcaggacggcgatcgttccggacgccgctagcttttcgatgccttcgtcagacgcccccaccaaatgatcggcagaaacagcatgcagctctgccgccaattccgcgccgccgagcgggtcaatctcatcagcatggattttcaggccgaaaccagcttcagacgcctttttcaggtagtcccgtgactggctgacggtaaagacgcctgtttctgtgaatatatcggcaaattgcgcgaggcctttttcttttatttcaggcaaaagctgcagcatgcgattcagaaattcgtcagggctgttccggtactcaggcggaatggcgtgtgcccccataaaagttgtgacaaggtcgaccggctggcgttcgcccagtttcttcgccgcggtcagctgtttcagttccgtgtctttgtcgagtccgtacccgctttttacttctgccgtcgtgatgccgtataacagcatgcgtccgaggtgaaaaagccctttttcaatcagttcttcttcggaagcggctttcgtgtctttgaccgttgacaaaataccgccgccttgcgccaaaatatccaaataggacatgccctgaatttttaaattcagttctttttcccgggaccctccgaatacaagatgggtatggggatcgacgaggccgggggtgacgagccgtcccccgcagtcgatgatgtctcttgcctcgtatccttcctccgctccttgatgtccggcaaaaacaatgcgcccgtcgtgaatgccgatgacggcatcttccgtgacatgaagatcctgcatgcttccgcctgatcgggggccgccggattccatcgtcagcagctggccgatgttggtgagtatggtatctatttgtttcggcatgttaccgctcctttttcatcggtatcataatgtcttgttcctcggcgacttgagccgctttttcataacctgcgtccgcatggcggatgatgcccattcccggatcgcttgtcagaacgcgggaaagccgctgttccgcaaggatgctgccgtcagcgaccgcgaccattcccgcgtgaagggaataccccatgccgacgcccccgccgtggtgaaaagaaacccagcttgcgcctgaggccgtgttgatcagcgcgttcagcaccgcccaatcgccgaccgcgtcgcttccgtctttcatcgcttctgtttcccgattcggagaggcgacagatccgcagtctaaatggtctcttccgatgacgatcggggctttcagctcgccgtttctgaccaattcattgatggcgagccccatcttttcccgttcaccgtagccgagccagcaaatacgggacggcaggccttggaatgtgacttttttctgtgccatgtcaatccagcggtgaagggcttgattttctggaaacagctcttttaataaagcgtccgtgcggtatatatcttcagggtctcccgacagcgcggcccagcggaacggcccttttccttcacaaaataaaggccggatgtaggcgggaacgaatcccggaaaatcaaaagcatcggcgagaccctcatctttggcagcctggcggatattgttgccgtaatcaaagacgacggcaccttttttcttgaaggcgagcatggcttccacatgctttttcatactctgcttggaaagccttacgtataattcaggctgatcccggcgcaggcggtcggcctcttcaagtgagtatcctgccggaatatagccgatcagcgggtcgtgagcggaagtctgatcggtcacgatgtcaatatggaccccgcggttcaaaagctcatgatgcacctcagccgcattgccgagaaggccgatcgataaaggctctccggcttgtctggctgcttcggcccagcgcagcgcttcgtcaattgatgctgttttacggtcgcaatagtttgtttcaatgcgtttatcaatccgtgtttcatccgcttcaacggcgatgacgacgccatcattcattgtgacggacagcggctgggcgcctcccattccgccaagtccggccgtcagcgtaagggttcctttcagactgccgccgaaatgctgtctcgcaagctccgcaaaggtttcataggtgccttgcaaaataccttgtgagccgatataaatccagctgccagccgtcatctgcccgtacatcatcagcccttttttctcaaggtcatggaaatgctcccaatccgcccatttcggcacgagaaccgaattagccagcaggacgcggggcgcgcggctgtgcgtgcggaacaatccgacaggttttccggattggatcagcagtgtttcatcatcttttaacattttgagggaacgctcaatcgcgtgaaaagcatcccagtttcgtgcggccttgcctatgccgccgtatacgatcaaatcctccggcttttcggcaacctccgggtcaaggttgtttcggagcatgcggagcacggcttcctgctcccatcctaagcattcaagttcggtgccgcggccggcgcggattgatttctttacatcagtcatcttgtaagtcccccttcattggtcatcagtttttggtgatgctcattcggcagaaaagactccttcttcagccagtcactcagatgctcgatgtcataagaaaacacgcggtcttcttgtatggacggcacgatgtttctcatttcgtgatagagctgttttgtgtacgaggcgcaatgttccgcaccccggtactccacggcctgcagcgcgcaaatggcttcaacggcaagcacccgtctcgtattcgcaatgatctggtaggcgtgccttgaggcgatggttcccatgctgacgtgatcctcctggtttgccgatgaaggaatggaatcgacactggcgggatgggccagggttttattttctgacacgagggaggccgccgcatattgcatgatcatcgctccggattgtaagccgggctgcgggctcagaaagggcggcaggtcattcagctgcggattcacaagccgttcgatccggcgttcagaaatattcgcaagctcggccgccgccactttgagaaaatccatggcaaaggcgatcggctgtccgtgaaagtttccgcctgagatgattttggcgccgtcttcgaaaatgagcgggttatctgtcgcggcattcatctcaatttctaatttttcttttacataggctaatgtctgccatgatgcgccgtggacttgaggaatacagcggatcgaataggcgtcctggacacgcagctccccttggacggtcgtcagcttgctgtctgacaagtaatagcggattcgctctgcgacatccatctgttcctgataaccgcgggcggcatgaatgtcctcgtcaaacgcatcgataatgccctgaaggccttcgatcgttaagctcgcaatccgttccgactgataggccagcttttcggcttcgaggtaagcgatcagccccatcgcggtcatggcctgcgttccgttgatcagcgcgagtccttccttagaggtcaggacggccggctgaagggttgtctgttctaaagcatgagctgtcggcatccgggccccttcgtaaaagacttcgccttgaccgataagcgccagtgcgagatgagaaagcggcgccaaatccccgctcgcccccagtgacccttgctgcgggatgaccgggtgaatgcgatgattgagatacgcgagcagttgatcaatcagctcagtccgcacgccggaaaagcctttcagcagggcattggcgcgcaaaagcagcatggcccgcgatacagattccggaaacggatcaccgacgccgcacgcgtgagaaagaatcagattcagctgcagatccgcggcgtcttctttttgaatcagcacatcgctgaacttgccgaatcccgtcgtaatcccgtaaatggtcttctcctcttgaacgatccgttcaaccgccgccctgctttttttcacacgttccatgctttcggcagatgcttgaacctcttcaaaatcaaacagcacacgctgggcatctgcggttgtcagtgaggaaccgtctaacgtcaccatcatttcaaccccttttcctttactttgataaagcgcccatacaaaaaggagctatgccatgaaaatgatatttcacgcatagccccctatcatctgaaatctatgggctgattcatatgtgattaattccgactccgaatgtttcgtgctcaagccccttaatcggagctccgatcgtgccgtaaagtgaaacggcgatccaatcgccttccgcctcgctttcatacggatttccccgcaagacggcaaacttcaggcccacggtacgaagcagcgagccaagcagcatttcgcccctcgtcactccgtgcaaagcttccattgtagcgtgatacagcgcatgtgattcgcgataaccctcagattgaatgacgccgctctttttggaagcggtttcaattgcagctaccaccttatgcgcatccattgaacccaccctgccgagacagactttccagccgtcccgttccagccgtctgatctgctggttttcttcagtctcatgaagcagaagaaggacggataagcgcccgatgcggcggtctttgtgtaaggtcatatatgcttcactcaattcttaaatattctgataactagtaactgttttttatattaagtgtttgcgaatcagaagtcaaaactttttttccagtctttcacaaatcagattgttatcgaagtaaagcggtacatcgcgaagccggcgctgttgatcacatatttccgccatccgcgtcataaaatggagcgttgtcttgaaagcgttttaagaaaagaagagagcgaggagatttcagaaaatgaaaaccagtttctttcgtgtgtgcctggtctcagcagcggtcatcggattcactctgccgcaggcaaaagcccagcatccggttttttcagaggtcagcgtgcatgatccgtccgtcatcaaaacaggagatacatattatgtattcggctcgcatttggcttccgccaagtcgaaaaacctgatgcagtggcagcagatgtcttcaagcgtcaatcccaataatcccctgatcccgaacgtctacaccgaattaaaagagacattcgactgggcccagtctgatacgttgtgggcgccggatgtcgcccagctggctgacgggaaatattacatgtactataacgcctgtaaaggagactcgccgcgatccgctctcggtgtcgccgtgagtgacaaaatcgaaggaccctacaagaacaaaggcatctttttgaaatcgggcatggaaggaaaaagcgaagacggcacgacgtatcatgcaaacgttcacccgaacgtcgtagatccgcaaacgttttttgaccataaaggcaagctctggatggtgtacggctcttactccggcggaattttcatactggaaatgaatccgaaaaccggtttcccgctcccgaaccaaggctacggaaaaaaacttctcggcggaaatcacagcagaatcgaaggcccgtacatcagctacaatccggaaacgaaatattactatctgtatctgtcattcggcggacttgacgcagccggcggttatcatatgcgtgtggcgcgctctaaaaatccggacggtccgtactatgacgccgcaggccataacatgcttgatgccaaaggaaaagacggcagtttcttcgacgacaaagcaattgaaccgtacggggtcaaactcatgggcggctacagcttcgcctcacaatctgaaaaaggcacgggctacgtatcgccgggacacaactccgtgttttacgacgggaaaacgaaacgatcatacctcattttccacacccgtttcccgaacagaggcgaagagcacgaagtcagagtacatcggctgtacatgaacaaagacggatggcccgttgcagcgccataccgctacgcgggagaaccggatacacagatatcggcatccgccgcatccggagcctacaaactcatccagcacggaaaagacattacagctacgatcaaaaccccaaaaaatatccggcttaacaacgacggcaccatttccggggaaatgaccggaacctggacaaaaacggacagcagcaaagcccgaatcaacctgaacggcacaaattatgacggcgtcttcctgaaagaatgggactcagcgagagagaaagaagttgtgacgtttagtgtgctgagcggtgatggggaggctgtttggggagtgaagtaaattagcacctactccattttggagggtgcttttttcttgctaattaggagaatgaccttctattgcttttaataaaccatttgaattatgatggattcaacctctatcgtttacagtgaacagtataaaattgaaaaatttgaatacatacctaagaaaaaacgaaaggaagtttaattttgaaagaaacaataaaagtagccgccgcagtcatacaaaatgaaaacaatgaaattctatgtgctctacgttctccaacaatgtctctgcctaatctgtgggagtttcctggtggaaagcttgaagaaggggagaatgcacgagaagcacttgtaagagaaattgaagaggaacttgactgtaaaattgttgcgggcgatgtaatagccgatattcatcatgaatatgagaaggtcatcgtcaatttaatttcaataaaagcgaagattgtatcaggggagccggtagcaaaagagcatgcggaattcagatgggtgcctatacgtgagctagaatcactagagtgggcacccgctgatcttccgaccgtatctgccttaattcgttaaatccacatacaagttttctgggacaggctgatggagcttccatttgacattcattggcttgtctccgtggcttgatacgtaatccgcttctcctacataaataaatggtaaagtgatgttgtgcatttcagtgaatttcctcacaaataaatgaatatggtatcctttttccttatggtgaataaagttttgccctacgcttgatgtatgtgaggtttggttttgactttgccagtgaaaatggctaggatcaataaaataatctttatatagcaaatgatcttctactttttctgacttattcaaattgataaagattaaatagtgatttttaactctacgtacaccctctcgccaagtcccttcctgatcagttgactgaaaaagataaatgagctcatttcttgtataggtttgatacattgtaagcttaatctcttttgaagcaagggcgtctatattgttcatacgtctaaattcaatcattccatagtggacgcgctccttaatatacggtccgaataatggatcgtttaatatctcgctcacttctggatctaacttgaatgtatcaccttgtaatgtaccaaagcgccaattctgtttttgatctgatttcgttaaacgctccattgctcgctgaatgaggtcatcatgtgtatctgttgtgatttgaatatgaaactgtttttctaacgattcttttacatcttctattgtgatgatatttttgtgaaaaccgctctgtaaaattaaccattcataaggccatttaataggtaattgctgttctaattttgctactatccctacaaccaaggggttattgagaattccttcatctgtaacattcaaatcgtccattttctttttggtctgtacccacgatttgtatttctttataaaaaaggtaagcccaggtgcctgttcagagtatagaaaatcaattaattctggagagcgtcctagctcttgtttaaattgcttgtataacgttttcagcatggcatctgaatttagtttaatatgatcgatcttatttaaaatttctttcttcgttacggctgaaaggtcaacataagatcccccaggtaaatctgaaaactcatgcgtcacggccactcggagggaatctttatcaaacgatttttggcttgtttgtccagatagtgcgagtggaataacaaatgacttttgatagtttccgataaaatccagtatcgttacaaactctttgtcgtctgtttttctaagcccccgtcctaattgctgaatgaaaatcgttggtgattctgttggtctaaggaacaatagtagattgagttttggaatatctattccttcgttgaaaatatctactgtaaatataagttctaaactgtggtgcgggtcctccaaatgacgaatgacctcttgtctttttgcaggagaatcatttcctgttaagtaagttgtataaaatcccaatttattaaattcatcactcatgtatattgcgtgttcgacgtttgtacagaaacctaagccaaccattttctcgccgtggaatccatacatgttgatcatcttaatgatatattctactcgtttatgagtttttaaatgatctactagcgatttctcttcgtacagtccatttttcacttttactttttcgtaatctacagtatgatctgaaattccaaaatagtgaaatggtgcaagtagctctgcctttagagcatcgcggagtctaatttcataaacaacattatgatcacaaatctgaagcacatctttaccgtcaagacgctctggtgttgcagttaaacctaataaaaactttggtgtaaagtagtttaatacagcttgataggtagatgcttctgcatggtggaattcatcaatcacaatgtagtcaaattcatctgttgaaaaggattccaatgtttcttttttatgtagcgtttgtacagtgctaaataaaaaacgcttatctctttcttttttcgttccactcaataaaccaaaatcttcatgattattggtgactttctggaatgtttcgattgcttttgtaagtaactcttcccggtgggcaagaaaaagatatttatttggtttaaattgctcaaaatcaaatgctgctaaaaatgtttttccggttccagtggcggcgatgatgactgcttttgtctccccttcgtttcttgtttttttaaggtttcgtaacgcttccttttgcatggcattcggggacattttcgttttgtaaagagagttttgagcagcaaaggaagcacttaccttttggcttcctgcttggaattcctcataggcttgtaaaaattgttcgtcaacaggctgtgtcttttcattccaaacagtgtcaaacaaatcttttgtttgttgataaacggggagatatctggtttcaggtagtctaacatttaactcatacccggtcgtaagtgcagcttgtgatagatttgaagatcctacaatgacactatgctgtccagaacagcgttcaaataagtatgctttcgtatggaaagattttttatattcatttacaattttcaactcaacattttcaaattgaagaagatgtcttaacgctttcggttctgtaatacccatataggtagatgtaatgatgcgtacagggacatgtcttttagcaagctcctgaagcggagggatcaaaagctgaacaccagaccaccttgtaaaactaaccataaagtctacccgatccgccgttaacatctcgtgttttaatgctttgaaaaagttatcatgagtttgatgatttcctagcagtttcagacgatgtagagagaattcctctgaaataggaagttccatttcgtttaaactataaagcactgtggaaagtggtaatgaaaaattcgtatgttgtccaagctgagaggcaactttctcgctcagctgaatcgcttgttcatattgatcttgatccacaagtgtttgaaatgtctcgctcagttgttttgccgtatgtaaagtcaaaacctctgcatattctttagggccaaccggttgaatgcgatgtgatgttggataaagtttttgttgttgctgaatttcctcatggaagcctctatgatttctcatcataatctccttttttatatcaataattccattttatcactactcttaccaataggtaatactaaaaaagaagagaataaagtcctatttattaagcgtttaaaaaataacgctgaggtagtttggtggagtatggagtattcttacattgaaaatggggttactgttgaggtaatgggcttgaattgactgcatgatctagtatttgctcttatcaactggaagtaggtactactttaaccgttgtggacaaactagagaagtgtgaaattaaagtagagaagaggaattagggcgcaatttaacttaaagctactttatcagaggtacttaacatgagggttcttttagttaatatagtagatgggaacaatattttaatgcctttatatatttgactagtatatttttaaaaatgtaagcgttgatacccaataaatccagtgctaaagtatacatatcaacccaatatcattcacctaggattgttactgcaaatcgcaggcaaaacctaaattgcgtcagacaggggaagacccccgtgtgctgtgcagtttgggttttttttatacccttttttcggaggtgatgctgatttcataacaaaaaaagccggagaaaggcgggcacctttcgtccggcggttcccccatttttaaggaggtatactcatggactatcataaaatatcaaaagagattttacaacttgtcggcggggaggagaatgttcagagtgtcatccattgcatgacgcggcttcgttttaatctatatgacaatgcgaaagcagatcggagcgggctggaacagacggaaggcgtgatggggacaaatattagcggcgggcaatttcagatcattatcggcaatcatgtgccgaaggtgtatcaggctttgatggaaagcagcgggctcagtgatgaaagcgcaaacaaaacttcaaagcagaagaaaaatgtgctgagcgccgtgtttgatgtgatttccggcgtgtttacaccgattctgccggccattgccggagccggcatgataaaagggcttgtcgcgctagcggtgacattcggctggatgtcggagaagagcgagactcacagcattctcacggctttcggtgacggtgcgttttattttctgccgcttttgcttgcggtaagcgcggcgagaaaattcagatgtaatccgtacgtggcggccgctgtggcgggtgcgattctgcatccggatttaacggccctgcttggagcagggaaaagcatctcctttatcggtcttcctgtaaccgctgccacgtattcatcgacagttatcccaattttgctggcgatatggctgatgtcctatgtagagaaaggaattgaccgaatcacgccttcatctttgaaattgattgccgttccgatgcttacgcttgtgatcgtcgtgcctgtcaccttgatcacagtcggcccgctcggcgcgattctcgggaattacctgtctgtcggcgttaatgatttgttcaatcatgcgggcattgccgcgatgattctgcttgcaggcacattttcgctcatcattatgacggggatgcattatgcgcttgtgccgatcatgatcaataacatcgcccaaaacggacatgattacattctgcctgcgatgtttttggcgaatatggggcaggccggcgcgtcatttgcggttttcttaaaatccaaaaacaaaaccttcaaatcgctggcgtttacgacgggcattacggcattgatgggcattaccgaacccgcgatgtacggcgttaacatgagattgaaaaaaccgttcgcggcagcattaatcggcggcgcggcaggcggagctttttacggtgtaacgggcgtcgcttcttacattgtcggcggaaacgccggtctgccgagcattccggtctttatcgggccgacgtttctttacgcgctgatcgggctttttatctcgtttgcggcgggtatggcggcggcacttctgatcgggtttgaggatgtacagtctgaacgggacaaagcatctgaaacgccgggtgtgacggcaggcggagaaatcattcacagcccgattaaaggcgaagtgaaagcattaagcgaagtgaacgacagcgtcttttccggtggaatgatgggaaaaggttttgcgattctgcctgaagagggcgcagcggtttctcccgtagaagggagggtgacagccgtatttaaaacaaagcacgccatcggcattacgagcacccggggagccgaggttctcattcatatcgggcttgataccgtccggctggatggcaggcattttgagatgcacgtcaaagaaggcgatactgtcgcgccgggagatctgctgattacttttgatatcgacgagataaaggctgccggttttgacgtgatcacgccggtcatcattacgaatacggatcaatattcatttacagacgtgaaaaaaagcggaatggtcaaaccgaacgaagcgcttctggcgttatcctgaaaaagaggtggagaaaacatgaagagatttccggaaggttttttatggggcggcgcaacggctgccaatcagattgaaggagcttataaagaaggaggcaaaggactttctacggcggatgtctccccggacggcattatgtctccgtttcatgagacggacgatgcgctgaatttgtatcacgacgcgattgatttttatcaccgctatcaagaggatatcgccctgtttgcggagatgggctttaaagcgttccgcacctccattgcgtggacgagaatctttccgaacggcgatgaaacagaaccgaatgaagaagggctgcaattttacgaccgtttgtttgacgaattgagaaaacatcagatcgaaccggttgtcacgatttctcactatgagatgccgctcggtcttgtgaaaaactacggcggctggagaaaccgccaaacggtcgatttctatgagcggtacgcccgcacggttttcacccgttataaagacaaggtgaaatattggatgaccttcaatgagatcaacgtcgttcttcacgctccgtttacaggcggcggccttatattccgggaaggcgaaaataaacaaaacacgatgtaccaagcggcccaccatcaatttgtggcgagcgcgctggcggtaaaagccggtcatgagatcattccggattcacagatcggctgcatgatcgccgcgacgacgacgtatccgatgacgccgaagccggaggatgtatatgcggctttgcaaaaagagcggagcacgctgttcttttctgatgtacaggcgaggggcagctatccgggctatatgaaacgcttctttaaagaaaacggaattacgatcgagatgaaggaaggagacgaggcgctcctgaaagaacatacggtggattacatcggcttcagctactacatgtcgatgacggccagcacggcgcctgaggatctggcgcaatctaagggaaatcttctcggcggcgtgaaaaacccgtacctgaaatcttccgaatggggctggcagattgatccgaagggcttgcgcatcaccttaaacacgctgtacgaccgttatcagaaaccgctcttcatcgtcgaaaacggactcggcgcggttgatcagccggaggaggacggaaccattcaggatgactaccgcatcaattatctgcgtgatcatttaatagaggcaagagaggcgattgaagacggcgtcgacctgatcggctacacgtcgtgggggccgattgacctcgtcagcgcctcaacggcagaaatgaaaaaacgctacggctatatctatgtcgaccgcggcaatgacggaaaaggcacgtttgaaagaaagaaaaagaaaagtttttattggtttaaagacgtcatcgccacaaacggagaaagtctgtaagcgcaatgttccggagaaagccggcaaaattgacattcagcaaagagaggaggacaataaaagcagaaaggcgggattcatatgtttaaaaaaattcttgcagcagtagacggttcagacatgagcaataaagccctggacgcagccatccatctggcgaaagaacagcaggctgaactcaccattctctatgcgggacgtgaagccgttgtctccacatcagctttaaccgggattgtctatgttccggaaaacttcattgaagacatcaaacatgaagtcgagcaaaaaggagcagccattctggaagatgccaagcagaaagcggcagaaagcggagtaaacgcggaaagcctgtacgtccaaggcgaacctgcgcatcaaattttaaacatagcgaaagaacagcatttcaatctgattgtcgtcggaagccgcggaatcagcggatttaaagaaatgatgctcggaagcgtgagccataaggtctcacaattgtctccttgtcctgtactgatcgttcattaaacagaaggccctgctgatgcggggcttttttcatgagaaaagaccgccggctttcgaaaaatagggtgaaatcttcctctgaatcaagtaaaatggctgttagtatttgtctgaataaacagtcaatgatatgggggaagcaaatcaatgcaagctgaacaaacatcaaatgccgtcatcaaaatggtcatttccatggtcattttcggatcaatcggctttttctcagaacatacgaatgtgccttcaattgaactggtctttgtgagatgtctgtgcgcctcattgtttctgggcgtctgctggtttggttccggacggtaccgcaccgaacaatggaaccggcgggaggtgctgcagacactggcctgcggattttttctcgtgctgaactgggtgtttttatttaaatcatttgaggagacatcagtgacgatagcgatttccgtttatcatttggctccggttctcgtccttcttctagggagccttatataccgggagaaactgcatattgtgtccgtcagttccatcgtgatttgttttctgggcaccgccctgatttccggcatcaacggaagtacatcattttctcagctgatgggatcgggtattatttgggccgtgctggccgcccttttttatgcttttacgacactggccgggaaaggcatcaacagcctcagcccatacgccgtcacctgtttgcagaccggattgggcgttatcattcttcttccgttcgtccgtttcggcgctttttctgatttgtcgcatgtgaactggatcatgattgtgtcgaccggtatcattcatacgggaattgtgtatttgctcttttttgacagcttgcggtttttatccacccggtttatttcaatcatcgtatttcttgatccggcggtggcgattgtgctcgacaccgtatttacgggatttcgccctgacctttatcaatctttggggattgtattgatttttgcgggaatggggctgtccctgattcgaaagcaaaaagccgtgccttcggaagctcaggcagacagcacccgtatataggcggccgtatcggctgctttttttgttttggggcttttcagccataacgaaaaagcagacaaacagatcatggaaaaagaggatagtaattgtataatacttcttgtgtttacaatttaagaaattaaaggagtgaagggcatgataaaaaagacgcgtcatctcgctttcttggctgcattcggatttgcgctttgtctggccatcgtatgttccgcatcaaagcaggcagaagcggcagcggcttatccggatgtgatgcagggacttaccggattcgcgggcaatgcgaaggatcataacggtaaagcaaaatccgccgtatcgggaggccagggcggccccgtcgtctacgtcagcaatctcaatgatttgaaaaacaatgcgggcggaacggatcgcaaaaccatcgtcatcacaagtgatatttcttccccgggtaaagccgtcgtgacagtcggcgccaataaaaccatcgtcggctcttataccagccacaggctgaccaacatctatctgaccaccggctccggctcaaacaatgtgattttcaaaaatctcattatcagccatagtgccgccattacaggcaacaacgacattccgatgtacatagcgaacggacagaattactggattgaccacgtgtggtttgaaggacacagctacaatccgaacagccacagtgatttgggaaagcttctgtatgtcggcgccaaagcggattttgtgacgctgtctaactctaaattcacagaccatctgtacggcctgattctcggttatccgaatgatgataacgaaggacgcaattatatcggctatccgcatatgacgatcaccaacaactattttaataacgtctatgtgcgttcaccgggcctgatgagatacggctattttcacgcgaaaaacaactatgtgaccaatttcaatttaggattcaccattcatacaaacgcgactgttttctcagaagccaactacttcggtaacggaaatgaaaaaggcggaatgatagacgactacgggacggcccaattcaccgacaccggttcattcccgtcgctcaaagccccgaaatcaccgcgcaccggctggaatccgagatcaaattacagctatggcaccctttcagcccaggacgccaaaaacttcgcccaatcctacgcgggagcgcaaaatacaaatctccgctatccataatacgaaaaaccgccggcagccggcggtttttttatatgaataaaaggttcaaaatccctataatccttaaaataaccttaaatacctaggaaaatattgataaacaatttcaataatattactattgttaagcctatattacaaaagaaggaggagaacctatgaaaataggaaaaaagaacaagtggaaaaaatggctggccggcactcttgcggcaacgcttatgatttccattgcgcctgccgatgtatttgcggcagaaacgcgtgaaaaacaagatcaagcgaaaaccgccgacattccggccgcagacccggaaaaagatcttccggcggaaaaagcacccgagcagatgccgtttaatcaaaaagatatcaatcaagacggtgagatcacgtctgaaagaactgagaattcaaagctttactatgaaggcgagggtgtgtacaaacaggaaatctacacagaccccattcatacgaaagaaaccgccaatgcggactgggaagacgtttctcctgaattgaaaaccggctcaaaggaagtcggaacggaaaatacagtgctgaattccgattttctgaagcaaatgaaaaacggattatacgctacatttgaacacaatgatcataagctcacatactcattaaccggcgcaaaaggccccgatcaggctgcaattactccgacagatgcctcagcaaaagtaagggaagacagcaacgagcttacgtatcagcaagtgtttcctgcaattgatttacaaacctacacatttaacgaaaacataaaagaagaccttgtgcttcacaaatatgaaggctacaattccttcacctttcaaatcaaaaccgaccttcaggctaaagaacaggaagacggctctatcgcgttttctgatgataaagacaatgtcgtctacaccgtgccgaagccctttatgaccgactcagatctcgacgaaaagtcaggtgaagtcaacaggtcagaaaatgtcagcttcaagcttgaaaaaaacagcgaaggctacttgctccatgtaacggccgatgaaaaatggctgaaagatcccaagcgggtttatccggtatctattgacccttcaacatcagtatctgtgtcatccgatacctttgtcatgagcgcgtacccgacgacaaactactctgccgcttcgcagaaatgggacgccggattgaaagcgtacgtgctgaaaactggatattatgacggcacaaccggaacgaactacgcttttatgaagtttgataatctaaagccgatcaaaaacatgacggtgacgaaagcgacgctcaaagcgtacacagcccactcctattacggatcaaaagcgacggggctttggctcgacaccgttaacagcaattacgacaatgccaagattacgtggaagaacaagccgggctccaaaaacatcggcaaagccgaggtctataaaggccaatgggcaagcttcgatgtcacctccgcagtcaagtcgtggaacagcggcggcgccaattacggctttaagcttcacacaaacggaaacggaaaagagtattggaagaagctgatgtcatcagcaaactctgctaaaaaaccatacattgaagtgacatacacgattccgaaggcggacacgccgtctgtcaaagcgtatcataacggagattcgacaggatttttcaatatcagctggaaaaaagctgaaggcgccaaaagctataaagtctggctttataacgggaaagaatatcaggccattccggtcggcaatgcaacctcttggagcacaaaaggaaaaaacatctggccgacaaaagcggaaatcgactccggcaaatataagctgcatacagacggaaaaggcggaagtgaattagcgcttaatccttcgccggtctataaaaactccggcggcagctatccggcaagtaaaaattactgggtcgcggtcagcgcggtgtttgaccagggagaaggcgccatgtctgcggccgccaagcccgtcattccgaatattggaagagttcagaaaccgagcacgaaaggctttaataacaacaacgccacaggctggtttgatctttcctggaaagccgtatcaggcgcagccgggtataaaatgcaagtctttaacggcaaaggctttgaaacgcttgacctcggaaataaaacatcctggtccacaaaagatcaaaacatctggccgacaaaggcggaaatcagcgccggaaaatatgcgcttcacctgaaagacaaaaaaggtgcggaattgccgatcaacccgggccccgtttataaaaacgccggcggagatgcgaaccggaaaacctacggatttaaagtcattgcttataacaaagacggagaagcgatcgcctcaccggaagcgagtccggcgctgcctgatatcgcaaagccgaaaaacctgacaggctatgtctatacgaacacgaaatccagccaaacgggttatgtcaatctcatatgggataaagtcaaaaacgccaaaggctacaaaatcaacatctacaacggaaaagattatcaatcattcgatgtcggggataccgatcattggacgacccaaaacaaacgcatctggccgtcagccgatgaagtgaaagcgggaagattccagcttcacacggacggaaagggcggcgaactggcgcttgacccttcacctgtttacgaaaacgcaaacggcaattacaaagggaagaagaactattccttcacgctgaccgcctatgacgcaaacggtgacagcataccgacggcaccttttaaccctgttttccatgaaggggcggaattcctcggaacggaagaattctggtctattatcgacattccggacggacagctgaacggcgcgacgggaaatgtcatcgtcaatgaggaagatatgtcaatcgacggacgcgggccggggctcgggctctcccggacattcaacagtcttgacagctctgaccatatgttcggccaaggctggtatgccgatgcggaaacgtcgatcctttctgaagacggcagagccgtttatattgatgaggacgcgacaacacatgtcttcacgaaaaaatctgacggcacgtatcagccgccgacgggcgtttatctcgaactgacggaaacaagcgaccaatttgtattaaaaacaaaagatcagacgaacgcttatttcagcaaaaaaggcggcaagctccaaaaaatcgttgacggacacaacaacacaaccgtatacgaatataacgacagcaatcagctgaccgccataacagacgcatcagggcgcaagctgacatttacctatgatgaaaacggccatgtcacatctcttacagggccgaaaaacaaaaagatttcatattcatatgacaaagaccttctcaaaaaggtgacggatactgacggcagcgtcacaagctacgactatgatgccgaagggcgcctcgtcaagcagtattccgcaaacagcacggatgacaaaccgctgttcactgaataccaatacagcggccaccgtctggccaaagccgtcaatgcgaaaaaagaaacgtacgactacagctatgacgcggacaaaaaaacgctgctcatgacgcagccgaacggccgcaaagtgcagtacggctataatgaggcgggcaacccgattcagatgatcgatgatgccgaagggctgaaaatcacgaccaacactgtatacgaaggcaacaacgtcattcaggacaccgatccgaacgacgcggatgcgggcaaagcgacagaaagctatcaatatgataaagacggcaacgtcacagccgtaaaagacaactacggcaccgaaacgtatcagtacaacaaaaacaatgacgtaacgaaaatgaaggacaccgaggggaacgtcactgacattgcgtacgacggacttgatgccgtttctgaaacggatcaaagcggaaaatcctcatccgccgccgtgtatgacaagtacggaaatctcattcaatcaagcaaagagctggcagcttcggcgagtctgctgaaagacggcagctttgaaggaacaaagcttggctggaatctcactgctacgagagacagcggaagcatcgcatctgtaaaagcaagaagcggcgcgctgtccggacaaaaagcattggagatctcgtcacaatccgcttcagccggaacagagcacggccatacgtccgcaacgcaggaagtgcagcttgagccgaatacgacgtatacactcagcggccagatcaaaacggatctgacgaaggcgagagcgtatttcaacattgatctgcgtgacaaagaccaaaaacgcattcaatggattcacaatgaatcaggcgcattagccggaaagaatgactggacgaaacggcagatcacctttacaacaccggccaatgcaggaaaagccatcgtctatatggaagtggatcataacgacaaggacggtaaaggaaaagcgtggtttgatcaggttcagctggaaaaaggcgaagtctcttcaagctataacccggtgcaaaacagcagtttcacggccaaaacagatggctggagcacaagcggagccgccgctgaccttgatgaaggcttcgatgatgacagctcattaaaagcgtcccgcacaaatgcatcacaagccaatgcggccgcaaaacaaaccgttacattaggccaaagcgcggacgataagccggtatatatcacgctgacggggatgtccaaggctgacggcgtaaaatttacgaatgacaatgattacgctcttcaggctgacgtcacttatgcggacggcacgacgggcgtctacaccgccaaattcccgcaggggacacaggaatggaaccgggcagcggcagtcattccgaaaacaaagccgatcaataaaatcgaactcagcattctgttccaaaaaagcgccacaggaacggcgtggtttgatgatatccgtttaatcgaaggaagcatcctgacgaaaaacacctatgacgaaaaaggaaactacgtcacaaaagaagaagacgaactagggtatgcaagcactgcttcatatgacgagactggaaagaaaatgtctgaaaccgacgcgaaaggcgaaacaaccgcctacgaatacgatcaggccgaccagctgacaaagctgaccttgtcaaacggcacatccatccttcacagctatgacaaggaaggaaatgagctgacaaaaacgattcgggccggcgcagaccagacctatcaatatgaatatgacgtcatgggcaagctcgtcaaaacaaccgacccgctcggcaatgtactgaagagtgaatatgacgccaacagcaacttgacgaaaaccgtttccgccaacggcaatgaagtgtcgctgacctatgacggcaccgaccgggttaagtcaaaagcgtataacggcactgaaaaatacaactttacctatgacaaaaacggcaatgaaacgtcggtcacaaacaaagaacaaaatacaacgaaaaaacgcacctttgacaacaaaaaccgcctgaccgaattaaccgaccgcggcggcagccaaagctggacgtatccggctgattcggataagctgaaaactttctcatggagccacggcggccaaaaaggaacaaacagctttacgtacaacaaacttgatcaaatgattgaaatgaaagacggcacttcagcctatacatttgattacgatgaaaacggcaatgtccagacattcatcagcggcaatgaagtcggcacgagtttttcatatgatgagcggaatctcgtcagctctcttcatatcggagcgaaaaacggcggcagcatcttccgggaaagctatgaatacgacgccaacggcaaccgcacggtcatcgacagctcagcgggcggaaaggtgcagtacgaatacggcaagctcaaccagctcgtcaaagaaactcatgaagacggcaccgtcattcaatatacgtacgacggcttcggcaaccggacaaatgttaccaccacaaaggacggcgcaagcaaatcagtcaacgcatccttcaacatcatgaaccagctgacgaaggtgaatgacgaagacctgtcctacgataaaaacggcaaccgcacatccgacggcaaatacacatatacgtgggacgcggaagacaacctgaccgccgtcacgaaaaaaggcgaagacaagccgttcgcaacatacaaatacgatgaaaaaggaaacagaatccaaaaaaccgtcaacggaaacgtcacgaactacttctacgacggagacagcttgaatgtcctgtatgaaacagacgcagacaacaacgtcacaaaatcatacacgtacggtgacagcggccagctgttatcctatacaaagaacggcaagaaatatttctatcactacaacgcacacggcgacgtcatcgccatctcagacagcaccggaaaaaccgttgccaaatatcaatacgatgcatggggaaatccgacaaaaaccgaagcgagcgacgaagtaaaagacaaccgctaccgctacgcaggctaccaatacgacgaagaaaccggcctgtactatctcatggcccgctactacgaaccaagaaacggcgtgttcttatcactagacccagacccgggcagtgacggcgattcgctggatcagaatgggtatgcatacggaaacaacaacccagtcatgaacgtcgatccggatgggcattgggtgtggcttgtagtaaatgccggatttgcagcctatgatggatataaggcctataaatcaggtaaaggatggagaggtgcagcctgggcagcggcttcgaactttgggcccgggaaagtgtttaaaggtgctaagaaggctttgggatttgcgaaggccgccaagaagtatttaaaacctggtaaatacgctagaaggtcaattcctgcaagaagtacaagtagcaggttaaataaaaaggaaagaagagtattaaacaaaattgggaataaatatggctgtcatacttgtggtagaaggcaccctggaactaaaagcagaaattggattgcggatcaccaaccagtatcaaaattaaggaagaaaggccagcgacaaaggctatatcctcattgtcaaacttgttcacgaaaacaaggaggatatactagtgctattctgagaaaaagacatcaacggaggtgaggatgttgggtggaaaaaaagaagccattctcgcattgcttaacgattcattcaataaggaagagtttccgtttcttgataatgagaattttgacttcgcaaaagggaagctttcgatttttattgaaagagataactggcttttaacgttccagctgtttggattgtcgagattgggaccagctattgatttttatgcggtgggtaatcaattaacaaataatgaagtaagttttttagatgatgaaccgtttttatttgcagatgaaaaaggaaatttgctggaattggaagatatagaatcgggttttacaagtaaacaaatcaatgtgtctcttagagagaaaacatttcaattttttattgagcaggaaataaaagataagatttccccaaagaatgaatggattacatgtttgaggcatatgaccaaaaatagattatttcttgacacactttggctgacgaaacaagaacaactggaaatagcgggtctctcttcggagtatgaacaattgtattcaacagaattatggatgcatccagaaggagaaaaagatttgcctagtttgtctcctttctttcaatcaattgccgaagcaatttcccgtcaagagatagcatatattcaaaaacatgatgatggtaacacagagtggccaaaatgggcacacacagattctgttcaatacttttgaagatattatagacatgcagtaattggaaataatccgttatatattaaataaattattatgtggaagataaaatataaaaataatttaataaggagaatgaattttgattaaaagtaaagaaattcttagcctattagatgatgaatttagtgaattaaaccgaccaatttttgaatggcgtgaatctaattatgttgggagtaaatgtaccttattaagattaaatgatgacaattggttactggcaattcattgcttcgaagtagattctaaaggaccttttctggctattcatacctatagtaactgtttttcagacaactacaaatcgataataattgatgacttcgccttaaagactgaagcaggtgagaaaataacatatagtgaaagtgattttcaacaattaagcgaagtagtggaaattgaaattaaagagtctcgttattgcgtaaatattcaccaaagaaatgaattccaaaagagtacaaaagaaagggcttggaaaacttatttcaggaatttgtttgaggatgcttcttttagagaggcgctttggataaagccaaaaaaactattaaatatactggatctaaaaagcgaagcagaaggagtattcgaaacagaggattgggaatatcctgattacctaacagatccaagccaattaatttcttttcaatcatttgcgcaatatcttgaaaaaggcgcaggttcagttgatgtaggtgatgtaaataataactggagggagtgggaggattacgatattgagtagttgatgaaggaaacctttttaacctctgggcgtacagaattcagacacgatattattcagggaatgagcggtatgaaatagaaaagaaagaaggccgttctattgggatattgggaagaagaatataaaaacaagaaagttttacttagtgatgaaggcttagatatatgttttgatgctgtagagaaattttgtgaattatataagagggagctggatagagaaccgatattagaagaattcttagcaactttagttaccgtaatgaatacaaatggagattcttctttcacagagttagttgataagcgaatagtagaaataaagccaacgaccaggaaagtgaaaccaatagctaaagtaacaccgggagctgttattcaaatacctttggataagatcgggaagtatacttatgcttgggtcattgaaggtgatctatcaaaaaataaagacgatgacattcttattcagtattataatattttcactgaaaatacacttagcagagaagaaatcattcgtctaatgaaagaagaaaataagaaaatatttgcggctaataccgggcacacaggttttctgcaaggagattggaaagtaatatccaagatgcctcaagagataatagagaaaaacagtcattctcaattgaaatttgttttatatgaagacggtaaatatctcataagtgaaggcgattcatttgcatcagaagatgaattagcagaggcagatgagaaaacaggcaaggacatccctaacccattaggtatatttggacattcatctgtagaatctattctctataaatattttgcaggaatgtcaatggaagaaatcataaagaatgaattgtaaaagactgattccttacattcttgcaattaatgttaaaggatacttactgtacagatactgacagtagtaaatgttttgaatgctgaacgagacataatatgaaaaaaatcaatctcaactctattacacaaaaagaaatcttacaaatagaaaaacaatttgaacgaatcgcattaaacaaaatagaaaacaatcaagaaaagtttagaaaaatgggattgaaaattgaagctgcttttggaagagtcggagacgaaaaagtaataggaaacgaagtacagccctcagattgttttgagaatagttataactcattaatatttttttctgtagcttatttggatggtaccgactttcatgataatgaagatggctattgtatagaccatttagatatatggatttgtgaaagaaggttgttttcggggaaagtgggatatttaacagatttagaaagtgaagaggaaatagcaaaagaaatccaagataagataaatcaattgtttttagaagctacagatataataaaaatattaaaagagtaatttatggcttcttttagttatttttagagaagagatttagagaggttaccaacctctcttatcttatatgataaaaaccaaactacacacggaacacgtgggaataacatatcgctgagacgaagtaaaagacaagcgctaccgctaacaggctaccaatacgacgaaggaacttattctatctcatacgatttacagtgtataaaagatagaaggagagaattaaatgtactatttttatgaaatatcaactctcaatgactatgattcggttgaaaaagagtataaaacaatagaggatttaatatttgttatattaaaaaatatggaaaataaacaatacgcaatgtattcttactctgtttcaaataaagatagtgatacttgtatattctcagcgagcttaaaaacaaatactttgtttaataaaaaaatctcatttataaaaacctcagcagaagagtacaaaaatacaataattgcgcatgaaaatataatcttattggaaaaagatgttgagttaaaagatatattaaatggagcccctttagcagagaaaacaattattaaagatttactggattatgttctttatcatatagaaataacagattccgagacaatcagaataggatctagacataaggaaaatattataaacattattaaataatggcattaaataaaaaatagatgagcctgttgatcatcttttggttaacaggctttttaaaaaaaattatagataataagtgggtaggtgattagaactgagacagtaaaaggtgacaatcgatttaaacttagcttgaattccagagcgtcattcaaatcatttactactaaattaaagctattaagtagagaacgaggagacagcatggccaaaatcggagacggttgtctggaacttgaaataacaccgagaaggtatcatgaggcgaaggatgatccatttatctcaacaacgtttgaactgttggaacataataaagcaatcgcccgcgattactctgccgttttattagaaagtgaatataaaatgctgatatcagatattgaagcattatcagcaggcaatcaagacaggatacgtttagaaacaattgaaccattttttatcctaagtattgataaagaaaacgaacattacagatttatcattagatttatggagaatcattcaaatacaaccttctataaattgaactgtaatgaagaaaagctagaaattttcgtgaagactttaaaatcagatctcaaagactccaaaactttattagggagataaacggtgtacaagacaattaatgaatgggtagattatatagacggagggtgcgctgtccttcattttgactttcatgtgtttaaaaaagagctttcacttaagattcaggtcgttgaaaataaagccgaatgtacgcataacattctttttcaaaatgcagcatctgtttattttagtgcagatattggtgatatgagattagaaaaaatagatccggaagaatacaattggcaagtatttgagatgagttaccacccggaaggaatcggtaatctatcaaatgctgtaattccggagtatcaatcaaatgctaattttcttataaatatgaacagcatgctgattgctgtagaagctgaaacagttcgctttgacgaccaatcattttatgcgtatcatccgaaatcataaataaacaaataagagaggttcccagcctctcttttcttacataacgaaaccgtttacggaggtaaacatgaacactcctttaaatttacaaaaagaatcattgagggctatagggaatctgaatgtgattaatccgcttaaatacaattcgatttattcatgtgatctagtgagtaaagatactttttctcaattaatgaatgacttagaattcgaaacagttctgatagaagtaatggcatcaccttcttttattgaaggatggaagaagaaggttgaaaagaaaatgataaatatgaatactgtatcgaaaaagttcattcatgttgaatgtgtcctaaccaaagaagaattgatggcagatcacttattggatgaattatattttttagcatcgatcaatgactttgtagttataatagcaaaccctgccaaaaataagtcctacatgaacctgaacactcaaaaggttgatgtaactactgaaaataatgaaaaaatcatttggtttgaatacgatgcagcagatttatatatcattgattaatttaatataaattccagattcctaatcaacggagtgttgctgatgttagaacttaccgcggagcgggttgggtcatataaaagagagcacatcatctatttcaatgcgggtcgggatgatcaagtgtttattgtgtcggtgcatgatcacaaagtaatattggaggttatgaaaggcagctctcttttaatcaaaaaagagttacacggattttctgaagatgcccatttctatctggttgattcgtatgatgacactatcgtgatcgtttacctggaaaatcatacgtgtcaattagccgtatgctgcgtaaacagtaataaaatcaatccgatttgttcttttctattaagcgccaatgtatttcatctgggtgaggatggattactatggatcggattaacggacgagggtatgtatgatgagagaaaccctcaagggaaagcgatatttgcttttcatgcagaagacagaacgttttattttaaagacgattttaaagaaatgatgcatgagtgctatgccgtacaatcgatcaaatctgatttgtatgtatgtttcgagggagaggattgctgtatcatcgggcattatcagattggacgggacagaattcgtactgttgcagaatatgtgctggacggcgatcaatactcctattgtgatcagctatccgtttcgaaaaaaagggtgctgctgattcagagtcacgaggataccctatttgcatttcataaagagaacaaaggcttatcagagactgacgtcatgatacacggtattgatagaaaaggagaaacaacgtacagagccgtacaggaccgcatgtttatctttcatgataacgatttatatctggtgaagtattgattacttctatgcagcatacatgccggcagaatgaaaatatcctgtaaggaagtgttcagtgatgagagaaaagttaattgacaagcttgaggaaaacaagaggcattttttaatgaaacaggtgcgtgcctcgctaagatcttgtgaagaatcagggtttgtttatcaattagctgaggcagaacaaagcaggcagatatttgagactatattatcgaattctttcccaagtgcagtgcgtgaagttgatataagcgacaaggagacagccatatcgcttattttagaaaacattgcggatacgggggttgaacggatgaatgatattgtttatctgtttcatccgtatagtaatgaagtcggtgctatcaaatgtgcgctgaaggattgtgcaagtcatctgcactgtctcatggattttatagattttgaaggccggctgctttctaacagctttattttagtggagccgtccttctcattttctgtctgtttatttcacacagaatacggctgtgagcttgtgtgtaaaccgccgaaaagaggtacaagatgcatcccttttttataaagaacacaaaggaatcggcagtctttcaatttcgaatatattccttatttcatgaagacaaagcgttgcccgaacaagtttttaaacaacgaaaacattattatctattcgaagaattccactgggtcttgtctgaagaaggctgggaaatgctcaaaagtttggcgcatcatcatcacgatgaatttatcttaatggctgttctgacacaaccggatgatatgaatcggttttacgaggaattcggatattttaactggttaaagattcctttaaatataaccgaagatgaatatctttcaatcttaactgattatccaaagcacagtaaaaatgacagcataatgaatattgcatcccgcgtcgtatgggcttcaccgactttaaagtgggcgatttacggagagagagattttgaaatctgtattctaggtattgatcaggagattgcgggaaaaacgttaggatcatggaggcccttagacgaccgtgttttagactgggtatctgttgtattcccggatcagattgtttcggatgaatttcaaaaaaagctcgcggcgcattataagtacaaggggaaatgacatgaaaataaaaatgaataagatagtcgaagaatcagtaaaaggatgtttttgtcattttgataactgcgggcatctgtatctcggacggcatcagaatgacgggctttcgtttacgatcatcgacaaatcgggcgatacgcgagtgattcatatcgatgaacaaatcccgtatgaggatattatgctgtttcaacagagttcggctgactggtatgtgttgattttctttgaatcgcatgagtataaagtgaaagtattttcagcagaaggaacagaacaaagtgcattttctctgccttcaggggtttcatgcagtcttttggatgaaaaacaaaacctgtggatcggtttaagtgatgaaggtatttatagtgatgaaaatcctgaagggcacagtgtgctgtgcttcactttagacgggcagctaaagaaaactcacattgatcagcagctttcagaaatatatgcgcccgcggcagatgactgctatgcacttgcagaaaaagacggactgatctacatgctgtattactcttatacagtcattgctgcgtttgatgaaaccgacgtgaaacgagtttggattatttctgataaaacatattccggggtttacgaccagctagcgatttctgatgacgggttttgggtatgcaaagatgatcattcactgtctctcattccggccgatgtcagtctgccgatgcaagaggtaatgtgctgtgatgcggatggtcatgagctttccgggcatcagctaaagctgactggcaatgccatttacgcggtctcgaattcggggatttataagcgggatatcagtaattggaaagtgtcaaaatgagatgatgaaatccaacagatattctttaaatgatgacgtcatccaaaacctgaaattacacaaaaaagaattagagggtccgctgccttcagatgctgggagatttgaagaagactttgagggggctgactgcgcgggggatttttatgagtatttcgcgcttatctgcggcagcttagattttgtgttggcagataaacaaatgcctgcgcggcagcgtaaagctttatataaatccttttttgagctgtatcctcaatatgcgcagctgaaaaatgctttaacggattatccggagctcagccgggaaatcgggcggcatgaacgggtgagagggctgttggtcagcattttaaacaagaaaggcaggcttctgacgtgaaagaaccaacaatagcagaatgtctgaagaaggctgatctgatcctgaacggtcaagcggtaagggaagaagtgtcggattgggcgtgggggtacgtgactgcacatgatccggaggttgaggatgaaaacgtttgggagatgctcgtgtatttgagcggtttgatctgaaagattcgcctgattcgtatctgcatacgattgaagaattaaaagattggatgcagggatataggtaaccgggaatacatgaagaaagggtgcgttcatgtcggaattagtctttacaagaatcaatacaaaaataaacacaagcggcccaatcattctgtccatgaatgcagcggaactcatcgtactggctcaggaaaaagtgcggaaagaagaatatatcaatcacattttcatattccggaacggtgatggacatttacgtcatcgctatcaaattcaaacatcaatgaatataatcggagttcaaaaatcgggggatttatttttgtttcttattcataaggactatgaagatggggtgattcaggaagatccgaatatttatatatggcacccgctcaaagggttttatcattcgctctacgggggacgttatatccggtcaatgacagtcgattctgcgaataatttgtggctgggctacgatgaagcgggaatattttcttgcctggacgacgatatcagttcaaaaggcgtggcccgctttccctttgaagacggaacttggaaatcttgcagtgatactttccgtacggctccgcaccttattgatcatttttacggggcgtatgcaaaaaaagatgccatgtatcttcattatcgtacgcttggtgaagattatattcggaaggtcgatttgcaaggcgaaacgttaagctttcatagggcggactttgactttagtgcacaattcaagaaagattcatcatattattttttgattcggaatcaagcttcgtgccaaattgacaaagcgctaaaatttcataacatgacaaaacaggctggggaatatcagctcactgataaaatctcaagaaaacctctccgttttacgcaagtggctgcttatcaagataaggctgcggggattgatgagagcaacaggctttacttgctgagctgacaggcggcttttaaaaaaggaagggcagaggtgaaacgtttgaaactgcgggaggcagaatacatgaattggcatggtttgagtgaggaggagacagagcagttgtggcgcagggtgaatcgcgcagtgaaatggaaaccgtacagtacatttgcttcaataaaacctccgaagccgtttcaagtctttaatgtatctcaaggattcaatggtatcggttttctggaagatgcagagatgcagattctaaaggcatttcaatcttgtacgttaaagcatgagtttatgtatgcgctggactggcagcatgaatgttatctatttaatcctcatgtgccaattgataaagatgaattcggtgaatggcttgtccccgttattccaaacggagactatggtttctttattcaccaggagtttcagtgggggctgttgggggatccgcggcagcaaaccattacgatatttggctcaccgctaataagggcgatagaaagaaacgctcctgtcttatttcaaaagtgaagacagcttgtgaatgaatctcatgcttttacgggaggaggaataacaggatgacagaagaagagttcggagctgcggaacaaagcttgagagcgtcttttccgaaagcgtataaacggctgcttcataaaaagaaccctgcggaaatcggaggatggattttttttcctatccgtgaacaaagccgcttacagaaaacttgggatgatgtgatcaggcaaaacagtgtgtgcagagaagagagcatgcccgacgatatgatcgtaattgctgacaacggaaccggagataagctgtgcttgaaaaagaaggacggtgtaatggaggagactgtttatttgtgggatcatgagactgccgatgttgagttgtatgccgcttctataggagaatttatagaaaatgaaaaagaataagtggctgattcaagagcttttagaattccgccttttccgggaacgagagatttctgtaattgagttggtgttttccttcgagtatgaacatcagctcatttgtttgaggctcatatgcaaagacgtttcttccgttcaaataaaagaaatggagagtcatgctgctggttcaggcattgtaacaattgatcctgctgctgacggagatgagggacagcattttctcgtggaggagtgggagaaccaaacgttccgcttttattgccgtcaatatgaaacagctgaaaagaaggaggcacaaaatggagtggcacaaacatgagaaagcagttctgctggggccggattcgccgggttgttttgaattgacggagtttatgttctataacgggtataacgagtattatgataaaatcccggtttttgaggtgaagctggctgatggacagtatgatgctgtgctgcggtttgaaggtgtgagtgctgcccggctggatgatctggagagcatcaccgacatccatctggatatcagcccggtcgacggcggctgggaatcgatacgctattatgtcgatgacggggaaggaagaatgagcttctattgcgccaagtgggtcgtgcttgacatgaagaaaaagcagtcccccgaatggcccggcaaaacgtcagggtaaagcggcggcatttcgcgtataatgaggggagccggacagagaaggagtttagtcatgaatgagtttaatgaatatgcgatcagccccgaaatccgacgggcgctgaatggcttgcaatacaccgagccgactgaagtgcagcggcgcgtcatccccgccgcgctgcaaaaaaaagacctcgtcgtcaaatcgcagacgggcagcggcaaaaccgcggctttcggcattccgatctgcgagcttgcggaatgggaggaaaacaaaccgcaggcgctgattttaacgccgacccgcgagcttgcggcgcagattaaagaagatatcacgaatatcggccgtttcaaacggataaaagccacggcggttttcggaaaagcttcttttgacaaacagaaaaccgaattgaagcaaaaaagccacgtcgttgccggaacgccggggcgtgtgcttgatcatatagaaaaagggacgctgccgcttgaacggctggcgtatgtggtgattgacgaagcggatgaaatgctgaatatgggatttattgaacaggtggaagccatcattcagcatctgccgaaaaacagagtcaccatgctgttttcagcgacgctgccggatgacgtcgagaagctgagccgcacatatatgaaagaccctgaattgattgaagtaaaagcggaaggcctgacgacaaaagacattgagcattttgtcaccagaacagaagaagaggacaaaacatctttgctgcgtgatgtcctgatcaccgaaaacccggacagctgcattatattctgccggacaaaagaaagagtcatccagttaaccgatgagctggacaggctgggctatccttgcgataaaattcacggcggcatggtgcaggaagaccgctttgacgttatgaacgagttcaagcgcggcgagttccgctatctcgttgcgaccgatgttgccgccagaggaattgatatcgaaaacatcagcctcgtcatcaattatgatattccgcttgaaaaagaaagctatgtgcaccgcaccggccgaacggggcgcgccggacaccgcggccgggccatcacgtttgtgacgccgtttgaagcgcggtttctgaatgacattgagacatatatcggtttccgcatccaaaagcgggaagcaccgtcagaaaaagaaacagcggaacggaaagcagcttttgcggaaaaactgaacgcccgcccagacgtcaaaacagacaaaagcgaacagttaagcaaagacatcatgaaactgtactttaacggcgggaaaaagaaaaaactcagagcggtcgattttgtcggaacgattgcgaaaatcgacggcgtttcagccgatgatatcgggattatcacgattctggacaacgcatcgtacgtcgaaattctgaacggcaaaggcccgcacgttcttgacatcatgaaaaatacgacggtcaaaggcaaaaaactgaaagtccataaagccaagaaataaaaaagaaagcctgccgcgcgcaggctttttttacgccgtctcctcggggacgaacgcaaggatggcaatgccgatcacaaataacaaaatcaggctgaacacggcggctgacgaattcccggtcagctgggcggtgacggcaatcaaaagcgggccgataatcgaagcgaacttgccgaagatattataaaatccgaaaaactcattggcgttctgtttggggacaagctttgcaaagtaagagcggctcagcgcctgaatacctccttgggaagtggcgacaagcatagccaaaatccagaagtcaaaagcggaatccataaaataagcatacgtgcagacaatcatatacacgccgattccggcataaagcatcgtttttcctttaaaccgttcggccagccgcccatacaaaatcgaaaaaggcgcggcgacgacctgagtgacaaataaaacaatcagcagatttgccgcgctgatgccgaggtcagccccgtatgacgtggacatcgtaatgatggtgccgaccccgtcgatgtagaagaaataggcgagcagaaacaaaaacagcgcccggtgcttcctgatctgcctcagcgtgccggccagccgtttaaaactgctgattacaagccgcggctccctctcgatataatagcgctggcggacgcggagaaggagcgggatcgaaaacagcccccaccatgccgccgtaatcaaaaaggcaatgcggccggcagcctgggcggacagcggaatcacctccgcttgtgctgaaagaatcacggcaatgctgaggagaaaagggatcgtactgccgatatagcccagcccaaaccctctggcggacaccatattcatccgctcctttgcggccacatcaacgagaaacgcatcataaaacacattagacccggcaaagccgatcgtggaaatcgtataacaaattaataacagcatccaagattcgccgggaatcaaagccagcgcggctgtgcccgccacaccgatcagaagaaagaaggcaaaaaaccgtttcttgcatcctttgtagtcggcaatcgttcctaagacgggaccgagcatcgccaaaataaaagtcgcggcggcaatcgtatagcccaaataagcggtagaatccgccgcgctgacaccgttttccgccgccgcggctttaaaaaacaaggggaataccgccgtcataataatgaccgaataagctgaattggcccaatcatacagcatccagctgctttcttctttcgaaaaccgtttcatcacacacgctccttcccaaaaaccggttctctgcattatatgcgccgctgcctcatcgttggacaatgatttctgaacggcgttttctgattgacctggagatattgacctagttcaaaaaggatgtaaaatcaaggtgtagcaggtaaatggtcaggcgggagggagacagaattgaagattgcgaaagtcattaataataatgttgtcagtgtgctcaaagaagacaatcaggaattggttatcatgggccggggcattgcttttcaaaagaaaacgggagacccggtagatgaagcccgcattgagaaagtgttcacgctcgataacaaagatgtatccgaaaagttcaaaacccttttgtatgatatcccgatcgaatgtatggaagtatccgaagagattatcagctatgcgaaattacagctcggcaaaaagctcaatgacagcatctatgtgtcgctgaccgaccatattaactttgcgatccagcgcaataagaaagggctggatatcaaaaacgccttactgtgggaaacgaaacggctgtacaaagacgaatttgcaatcggcaaacaagcgttggccatggtaaaaaacaagactggcgtgtctctgccggaggatgaagcaggctttattgcgctgcatattgtcaatgccgagctgaatgaagagatgcccaatatcatcaacattacaaaagtcatgcaagagattttgagtatcgtaaaataccattttaagattgacttcaacgaggaatcacttcactattatcggtttgtcacccacttaaagtttttcgcgcagcgtctttttaacggcacacatatggaaagccaggacgattttttgctggagacagtgaaagaaaagtaccatcgggcgtatgaatgcacgaagaaaatccaaacatgcattgagaggacgtatgaacacaagctcaccagtgacgagctgctgtatttaacgattcacatagaaagggtagtcaaataagcataatgaaagcgttggcatttttttcttcatttacgtatgatcttgttaggattgttactgataagcaggcaaaacctaaattacaatgagcactgatcatttctgtttgtgctgatggtaatttaggtttttttaagattcattattatcattattctgaccgatgtccccttttaacagaatcatgtatgatcaataaagaaatcgctttcaaagaaaggggaatgccgacatgttttatcgtatgaaacgagtgctgctgcttcttgtcactggattgtttttgagtttgtgtgcgatcacttctactgcatcagctcaaacaggcggatcgttttttgaaccttttaacagctataactccggattatggcaaaaagcaaatggttattccaatggagatatgttcaactgcacgtggcgtgcaaataatgtatcaatgacgtcatcaggtgaaatgcgtttggcgctgacaagcccgtcttataacaagtttgactgcggggagaaccgctccgttcaaacctatggctacggactttatgaagtcagaatgaaaccggctaaaaacacagggatcgtttcatcgttcttcacttatacaggtccaacggatggcactccttgggatgagattgatatcgaatttttaggaaaagacacgacaaaggttcaatttaactattatacaaatggcgcgggaaaccatgagaaggttggggatctcggatttgacgcggccaatgcctatcatacgtatgcgttcgattggcagccaaactctattaaatggtatgtcgatgggcaattaaaacatactgcgacaagccaaatcccgacaaacccgggaaagatcatgatgaacttgtggaatgggataggtgtcgatgactggctcggttcctacaatggtgtaaatccgctatacgctcattatgactgggtgcgctatacaaaaaaataatgtacagaaaaggatttccgctggcggaaatccttttttaattaaaacgaaataatcccaatcaaaagcgccgcaatcgtcatcacaatcgttgtccccacggcccatttaatagtgaatttttgatgatcgccaaagctgacgcccgccattccgaccaatagataggtggatggcacaagcgggctgagcagatgcaccggctggcccagcaaggaggctcttccgatttcagcggcgtctattccgtaagcggaagcggcttcggcgatgatgggaagcacaccgaagtaaaaggcgtcatttgacatgaaaaaggtgaaaggcatgctggcaatcgcagtgatcaacggcagatgcgggcccatggcatcagggatgagggaaacgagagaatgcgccatcgcatccaccatttttgtgccggagagaatgcctgtgaatatgcctgccgcaaacaccattgagacaacgtttaacgcattacccgcatgcgctgaaatccgtttctgctgctctttgacatttggatagttgatcatcaaggcgatggcgaacgcgatcataaaaagaacagggattggcagcaggctggtgatcagcgcggccatcagagcgacagtcagcaacaggttgaaccactggagagcggggcgcttcagcggcgccgcctccggatcagaagacggcgcgtgttcaattgaaatgacaccgagccgcttccgttctttttttccgaggagataagcaacggcgatcacccagagaacgccggcaatcatagcaggaatcagcggtgtgaagacctccgacgtgtccaatttcaaggaagccaaaaccctcgccgtcggcccgccccacggaataatattcatgacgcccgaaccgagcatcgcgatccccgccagcaccaaacggttcatgccgagccgtttgtaaaggggcagcattgccgcaatcgtaatcatatacgttgttgtcccatctccgtccagcgaaatggtcatcgtcagaaccgctgtgccgacggcgatttttaacggatcccctttgacaagcgatagaattttggcaatgaggggatcaaacagacctgagtcaatcataatgccgaaatacaggatggcgaataacagcatgatcccggtaggagcgaggtctgtaacgccttgaatcatcatctcgccgagatctttgccaaatccgctgatcagggcaaacacaacaggaacgacaatcaaagcaataagagcggaaagccgattagacataataagatacataaagacaatcatcatcacaaaaccgagtatggcaagcacgatatgacctcccctgttcaatagctgtattggtaagcgctttcacaatttatttctgtgaaaatggcttatttcaaaatgtgtatgaccgcatatgtaaatacagacctaaaatcctaatgagccgatcagcagtttatatgaagaacgccgcgggtaaatgtgctgtagaatgtttcgttttaaaagggggaactgacatgagtgatgatcaaaacaaacgagtaaatgaacactcaaaggacgaacagctggagcagtaccggtctgataacagcggcaaaaaaatgacgaccaatcaggggcttcgcgtgtctgaggatgaacattctttaaaagcgggcgtccgcggccccacgctgatggaggattttcattttcgtgaaaaaatgacgcactttgaccacgagcggattccggaacgggtcgttcatgcgcgcgggtacggcgttcatgggcattttcaggtgtacgaaccgatgacggaatatacacgggcgaaatttttgcaggacccgtccgtcaaaacgcctgttttcgtccgtttctcaacagtggcgggctccaaggggtcagccgacaccgtccgtgacgccaggggatttgcgacgaagttttatactgaagaagggaactatgacctcgtcggaaacaatattccggtgttcttcattcaggacgcgatcaaattcccggatctcgttcacgccataaaaccggaaccgcacaatgaaatgccgcaggctgcgacggctcatgatacgttctgggattttgtcgctaataaccctgagtcggctcacatggtcatgtggacgatgtctgaccgcggcatcccgcggagctatcggatgatggagggcttcggcgtgcatacgttccgtttcgtcaacgagaaaggaaaagcgcgctttgtaaaattccactggaaacccgtgctcggcgttcattccctcgtatgggatgaagcgcagaaaattgccgggaaagatcccgatttcaaccgccgcgacctgtgggaaacgattgaaaacggcggcaaagtcgagtatgagctcggtgttcagatgattgacgaagaagatgaatttaaatttgatttcgatatccttgatccgacgaagctgtggccggaggagttggttcccgtcaagctgatcggaaaaatgacccttgaccgcaatcaggacaatgtctttgcggaaactgaacaagtcgcattccacccgggcaatgtcgtgccgggcatcgattttaccaatgacccgcttcttcaaggccggcttttctcttatacggatacacagctcatccgtcttggcgggccgaattttcacgagattccgatcaaccggccggtctgcccgttccataacaaccaatacgacggctaccaccggatgacgattaataagggccccgtcgcctatcataaaaattccctgcagaacaatgatccgtcgccggcctcagaagaagaaggcggatacgttcattacgaggaaaaagtagaaggcagaaaaatccgccagcgcagtgagagcttcaatgactatttttctcaggccaagatgttctggaacagcatgtctcccgccgagaaagaacatatcatctccgcgttctgttttgaagtcggaaaagtgaacagcaaggacgtgcagcagcaggtggttgatgtcttcagtcacgtcgacgccgggcttgccgagcgtgttgcgaaaggaatcggcgtgaacccgccgccgaaggaccgtgaatctgatgaaacgttcacttccccggccttaagccaggaaaacacggtgaagacggcagcgacaaggcaggtcgcggttttaaccgaccacgggttttctgatgagaaagtcaaacaagtgcttgacgcatgcaaacaggcgggagtcagagccgatatcatcagccccgcgctgggaaccgtcaagggagaaaacggtacggagctgaaagcgtcagccactttcctgacagcggattccgtcctgtacgacgctgttttcattccgggcggaaaacaaagcacagacagcctcaaagcccaaaaatcggccagagacttcgtcagcgaagctttcagccattacaaagcgatcggcgcctccggtgaaggaaaagaacttctcgccctcgccgccggaaccgaaagcggccccggccttgttccggacgggaaccatgaacaatttctgaaggccgtggctgagcatcggcattgggacagaaacatataagaatgaaaaagcgccttttatgagaggggcgcttttttcttgtgaaagtgaaatatctgaacgaagcattaatattgggagaaaacgaaaatggcttccgtgcaaatccgtccgggacattcagacaacagttctagagagtcagggcattgcattatttaagggttctgactgatggtgaaatgatctttggtttacttccgctctgtgtttgtgtatcttaggggtagattttctggaggagcgaatgatagtgaagccgtttaccgaaaaacaactcgaagaatattaccggcgtgacgaaaacatgatgattttggtgtttgcccagtggtgcgtcaatcatgaccttgatccgatggccatttacagcaaggcttatcccggacagcctttaaacgaagagctgcgaaaaacggctgaagagcttgtcgtgccgaaggaggaatcagaaccgattcctgatcaaaccgttatcggcgttttggagatgttcggcaactccgatttggcggaagccgtttatgaagccattgcgcaaagaccttcacggtaaaagaggcgtggattttccatgtctctttttttcatggagaaaatgtgaaagaaggcccagaaacaatttactgatctgcgctgtctatagagtgtaacccgttttcaaaaagggaacggtaatgaaaaggaggagttgtgatgaaaaaggcattcaaaatgatggcggccgtgctcttaaccgtgctgacagccgcgccgttcggaggtttcgcgccttcagccgaggccgcgcaaaccgcaaagcctgttgtcaaaagccatacgtataagcatgtaaagcagctgacataccccgaggtcacaaatacgggaaacgcatcttttgaaaagaaagtcaatcaggacttcaagcgctatattgaacaatcgtacaaagaatatgtgaaaaacaaaaaagacggtgaaaaacaaggctacaaagcggaataccaaacagattttaaggtgaagtataatcaagacggcaagctcagcattgagacggaagactacagttacacaggcggcgcacacgggctgacatccgttcagacctttaattacgacctggccgcgaaaaaacgggtcacactcgataatgtgctgaatacaaaaacgaaagctaacaaaacgagagactatctttacggctacatcaaaaaacatgacgatctgttcgaccgggacgtcaaaaaacaagatattactttgaataatgaaagacctttcttctttacgaaaaacggcattgccgttgtgttcggacaatatgatctcgggccttacgcggcaggaatccgggacgttttcgtacctgcatccgtctatcaataaaaaaaagcgatatcactccaaaacggagcggtatcgctttttttcttttaccagacaaacaatccgacaatcgccgcgctcaataaggaaacggcaattccgctgacaagcagcttccagacgttttttccgatgatggctgatttttcaccatcaagcagagattgataagatccgtagatcataccgatggtgctgaagtttgcgaatgatgtcaggaatgtcgtagccacggcaatcgtgtgcggcggaagtgaattcagctgccctttcagatcggccattgccacaaattcattcgtcgcgagcttgatgcccatcagctgtgcgacatacatcgcgtcatgtacgcctaatccgaggaggaaggcaaacggactgaagatgtatgagaaaatcttttgaatggtcaacccgtgcatgaacagcccgagtacgccgtttaacgcggccgttaacgccacatagccgatcaccatcgctaaaatgacaatgaccatgttcatgccgacaagcatactgttagaaatcgtggagaagaagtcttttttctccgcttttgaaggcacgtaaataatatcatcctctttagaaacgtccacgggattcagcatattggcgattaaaagcgcgtttaagcaattcagcgggatggctgtaaacacataagtggacggaaccatcgtcaagtatgatccgatgatcgagccgctgatgctgctcatgctcatcagcccgaatgtcagaagccgattgttgctgacggcggcaagctgctggcggatgacggctaaagcttccgtatttcctaaaaacatcatctggatggagaaaaagctctccagcttcggcagacgggatattttagaaatcagccagccgattttatcaatgagccacggcagaataccgaaatacgacagcatatcaaagaaggtcacgacgaagataatcggcagcaatgcgctgaagaaaaaatcaaccgtcggattggccatgacagacggaaaagcgaacgcaatcccttgactggcgcaggaaatcagccatgtaaagaacgcgccgatcttcccgatgacaaagccgccgacttttgtccctaacataaaccaagtaatcagaaactcaaagacgaggagcatgacaatcggacgccatttaatcttcttcttgttgggagagcataagaaaacaacagccatgacaacaatgagaccgacaatgttcaataaaaagtacatgtgagcaactcctataagggtattatggaaataaaaaaagctcttattcgtcacaaattcctgaaagccagaaagtgtgataaataagagccaaaagaaaagaatagactgacagcatcatatgcttttcactcgttcaaatttatgcaaactttcttgtagtctagtcttttacggcactaggtagaaacaatcagaccatattactgatcatatacaagaataacgatattacatgagatagcagtattttatcgtttcaatttttgaaaatcaacctttttagatattttcaaaataataaatttatattataaataaagaaaataaaggatgtgcataagtaattggataataaaggtataaaatacccccaaaaccgttccggttcattgtaaagacgggatgcagctgataaaatggatctgagggcacagccttcaaaagacggcagaaaaggggtcattttcgtgatcatccagttcattcgttacagataatgagaggtatagatgaataggttaaaccttccaattcggcgaggtttatttgtctatgcctttttcatttcatcggaatgacgaatgaatgaggtgtttttttgacgtctataaaaagaaaacgcgcggaattactgcaatcatgccagtccgtgttcaggtgtccgctatgccggtcggccatggcggtctcacaatacaaaagcttgatttgcggacaggggcatacatttgatatatcaaaacaaggatatgtgaatttcctcaataaatcggtcaaaacccgctatgacaggcagctgttcgaagcgagacgcgagctttttgacagccgggaattttttgggccggttcaaaaggagatcgccgccatcatcacccatattcaatctccgcaaacatcagcggcggtattggatgcgggatgcggagaagggtcacatttagccgccgtatgcaaatggcttcagcctgctttttccgtgacgggaatcggcattgatctctcgaaagaaggtgtgctgcatgccgcaaaggccttcgggaatcatatggtttttgccgtcgctgatgtggcggatgcgccgtttgccgacagctgttttgatgtcgtgatgtctgttttatcgccttggaattacaaggaatgcagcagacttttacgaaagggcggcacagtcattaaagcggtgccgcggcgtgattatttgaaggaagtaagggaattcttcttcggagacagccctcggcggaatgacaccgccgattctgcggccggacgattccaagcgggctttcaaacctttgagcgcaaacggctgtgttacacaaagactttagcgcagcctgacctcgagcggcttgtgaaaatgacgcccttaacatggaaatgtactgatgacagcatccggcggtttatcagccggaaagaggctgctgtcacgatagatatcgatattttaatcggaaccgatccgctgtaaaacggaaaagacacgctaatcgcgtgtctttttttttatttccagacttcaccggcaatgttgacgacatggcgcagtttcgcccattgctgttcttctgtgatcaggtttccttcctcagtggaggcgaatccgcattgcgggctgaggcaaagctgatccagactgacatattgtgaagcctcttcaatgcggcgtttaatcgcgtccttgtcttcaagttcgccatgtttcgacgtaatcaagccaagcacaagctgaagatcagagcgtttgacataacggagcggttcaaagccgccggagcgggaatcatcatattccagaaacaatccgtcaagatcaagcccgtcaaaaatcgtttcagccgctgcatcatagccgccttcagccgtccatgtggattggaagttgccgcggcagatatgcatcgtaaccttcagatcgtcagggcgatccttgatggcgtcattaatggaagcggcaaacagcttgcgcagctcatccggcgtcgtgccgaaagcttcaatctgacgaagccccgcttctgataagaaaacggcccatgcggtgtcatcgagctgaaggtagcggcacccggcgtcatagaaagcttgaatcgcttttttatacgcttttgacacatcgtgctgaaattgtttgtaatcattctggtaggacgctttttccaattttccgcggaaaaacagcatattcggacttgggatggtcattttcggaacagcatcgccggcaatgctgtgcaggaatttataatcttcgagcatcggatgctgagaaaaatcaatatctcccgttactttaatgccgcgcgctttcgtctgtacgttgtgaaactgaatgccgctttcaggcgtaaacgcttcgacgccgtctaaattttcgagaaaatcaaaatgccaccaggcacggcggaattcgccgtcagtcacgacattgaggccggtttctttctgcttttctacgctgcggatgatttctctgttttcgatttcgcgcagctgttctgccgaaatctcacccgccgctctttgcaggcgggcttgcttcacagccgccggccgcagcaggcttccgacctgatccgcgcgaaacggcgggttttttcttagaagcgtatgcaatggttgttctgtgttttgctgtgacatgaacgattccttctttcctgatgaaatataaaaaaactcttccctcggatagggaagagcttgcgtccgcaaatctcaaccttatcttcaggatttagcaccattctgctgaacagcggttgccgggtatcatagggccagtccctccacctctcttgataaggaaatatgctatttttcagaataaactgtaatactcttaatcttagtatattatcttatattgtcaatatatttcgataaatatttttatttgtcaccctcaaatagaatcatatctatcacgatggcgatcgcgagacaaagaacgatatcctcttccttttcaatctgcaaatgataggaatcgccccagctcatccatgatttggtgacggtcatccggtttgattttccgtctgtcacttgaaaattccggccccacacatcgccggtaagatcccagccgagtccggaaatttcaaatttcggtttgaaaaacgtgactttcttgatgacttggcagacgggtttgccgctgacggaaatctcgtaacggggaacgagcgacatcagtttctggttgacgctggcgagcgtgcggccgtccaaatcagtcagtttcagttcatcaccgaatgaaaacagctttccttcaacattgtagacttcttttccgctttcaagaaacacttgaaaacgattcttaaacgtaaacattcgctctttgatgtaaaaatggtacataaaaaaactcctttcttatgttgtacgaaaaaaggaggcggttggtttcatatcggccgggtgcataaaaaaaaggctgccgattttgcggcagctgtcgtttttatgatatcggcatccggcgtttttgacggatcgcatttaaatcaatgatgttattcgtgtcggcagctgtcaccagcgggcttgtctttggcgttttccggcggttgtccttactgaaagagaaaacaagataccctgtcaaagcagcaaaaataagtagcatcattttacatacctcccaaaaaaagttttggtattattattgtacgaaaaaacaaacgaaaagtattcaaacaattgtcacttttttaaaaaataacgtcattttccgtaaaaatgactatgggttgaagagattttgctcttgttgtggttctatagattgtatcggctgatgaatgatgatcgtttatataactttttcactattttttgtaagtgtctaattaactacttcagtgttttcgtttgccttgtgttattcagtaccctaaaaaaccttatcatatgcaaaataactgcttctaacagatgactgcgggatgacagcgctttctttatttttttaaagaaaacgagatgttatcttaaaaaaatcgtttgaacattttccgcagttttttaaaagggtttgatttcgtctccagaatacgcgggtcttttaaggtttttttcaattctttcgctacagtccctcttgccatagtcttcactccttctttccaattcataccttatatacggaaagaaagaaggaaaggtttcatgtgaaagaaaaaaaccaaagcagggggctttggttttaagcgcgctcttcaaagagcctggcgatttcaacaatgacgtttaccgccttttccatatgatcgacggaaatgtattcatattttccgtggaagttttggccgcccgtaaaaatgttcggtgtcggcagccccatgtaagagagctgtgatccgtcggttccgccccggatcggttcgataatcggttcgatatcgaggtttttcatggcttgataggcgacatcgactatctctttgaccggttcgattttttctctcatgttgtaatattgatcacgcagttcaagcttgatgctttccttgccgtatttggccgccagcgcatcggcggttttctgcatatattcttttcgttctgcaaagcggtctctgtcaaagtctctgatgatgtacgacagggcggcttcagaaacgtctccgttcatggaaagtaaatgatagaagccttcatacccttccgtatattccggcgcttcttctttcggcagcgcgtgatgaaattccatcgcgatttttgaagcgttgaccattttgtttttcgccgttcccgggtggacgctttttccgtaacaagtaagctttgcggcggctgcgttaaagctttcatattgcagttcgccgagggggcctccgtctatcgtgtaggcgaatgcggcgttgaagcggccgacatcgaatttgtgagggcctctgccgatttcttcatcgggcgtaaacgcgacccggatcgttccgtgtttgatgtccggatgtttgatcaagtacgccattgccgtcatgatttcggcaatgcccgctttgttgtcggctccgagcagcgtcgtgccgtctgttgtgatcagcgtctggcctttatagcgggagagctccgggaattgctcaggcgacaggacgacattgagtttgtcattcagaacgatatcatgtccgtcgtagctctcaataatctgaggattcacatttttcccggtaaaatcggtcgcggtgtccacgtgagccagaaaaccgacagtcggcacgtctttatccgtatttgccggcagagtcgccatgacgtacccattgtcatcgactgtgatgtctgtcatgccgatcgactttaattcatctgccagcatgttggccaatgtcagctggccgggggttgaagggcagttttcattgttttcgtcagactgtgtatcgacttttacataagaggtaaagcgttcaatgatttcatttttcataccgtcatctcctttgtcttatcttaccatgcgcgggggagggatttctatttcacaacccgtttgaatcgagggctctgtgtattacgcgaatgaaaacaaattatgaagaaacgatgactaaacgattaaactttttggaaatggatgattgaggaagaaaaaaccgatataatatggtcaattcattcaataggggaggctttcttcatggcgattttagtgacaggcggagcgggttatatcggaagccacacatgtgtcgagctgttaaacggcggctatgacatcgtggttttggataatctgtcaaatagttcaccggaagcattggagcgtgtgaaagacattaccggaaaagggcttgtattttatgaagcggatctccttgaccgtgacgccgttcaccgggtgtttgctgaaaatgagattgaagccgtcattcattttgcgggattaaaagccgtcggtgagtctgtagctgttccgctccgttattatcataataatctgacggggacgtttattttatgtgaagccatgcaggcacacggtgtgaaaaaaatcgtcttcagttcttcagcgacggtttacggcgttccggaaacaacgccgatcactgaggattttcctttaagcgccaccaatccttacgggcagacaaagctgatgctggaacagattttacgcgatctgcataaagcggattctgaatggagcattgcgctgctccgctactttaatccgttcggcgcgcacccgagcgggcggatcggagaagacccgaacggcatcccgaataatttaatgccgtacgtcgcacaagtcgctgtcggcaagcttgagcaattgcaggtgttcggcaatgattatccgacaaaggacggcaccggcgtgcgggattacatccatgtcgttgaccttgccgagggccacgtcagagcgcttgaaaaggtgctgaacacaacaggcgcggatgcctataatctcggcacgggaagaggctacagcgttcttgagatggtcaaggcgtttgaaaaagtatcgggaaaagaagtgccgtaccgttttgccgcccggcgcccgggagacatcgccgcatgcttcgcagacccggcaaaagcgaagactgaattaggctgggaagcaaagcgcgggcttgaagaaatgtgcgccgactcttggaagtggcagtcctccaatgtgaacgggtaccaaaaggtgtaaaaagaaagagaccttcaaatggtgaaggtctcttttattacggtcattatttaattttcacttcaacatcgttgctgaactttaatttccaagtgcctttagagtatgcgtttttatcaacttcaaaagcttttacgtcagtaactttaatgttcgggttcaagtcacttaaaattttactgttgtctacttttgtttctgttgcatagcttgaagaagcatcaatatctgaatcataggatgttcctttagaatctactaatttcgctcttggaatggagaaagagcttaacggcttgtttgaaacatttttaactgtgtattgaacagctacgataacgccgccgtcagacgcttttttctcgacaaattgagagcctactgaatctcttttttcgactttcgtaacagtaacttcagttttctcagtcttaacagtgtcaccgatgttatacagtttttccttggattccgcagcttttgaagacgcggttttagatgatgaagatccgcctccgccgccgatgttcacgagaatgataataaccactactgccagaagcaatgtgataattttatgtctcataaaaaagtttctctgatctttaccgcagtttgggcattttttaacgcctttagcgatttctttgccgcatgccttacaagacaccaggttgcctgccataatatttcctcctatgtaaactatttcttgaaaactacatactataatgcctgtaaaataacctatagtcaataatattttgagaaaaaaagtattttaatgattttttagtcatgtattttaaggaccttttttagtatcggcagatcgttcgaattttttatacgtttattgaaaaaagagtggttgaacatgttcgtgatttcccgtataatcttgaaagatatacaaaaactgaacataaaaaacagtggttttctagggttccgcaatgctgaattggtctggaccgagagaaaacacacagcaggttcctgctgtgacacgttgggataaaagcccgggagtttctgctcttttaatgaagagtgctctcccgggcttttttgattttatataaagggagtgtctgggatgaaaaagagattgctggatgtgctgatgctgattattggggcttttatctttgctttggccgttaatttattcgccattccgaatgatcttggagagggcggggtaacgggaatcaccctgattttgtactatgtgtttgaatggtcgcccggggtgacgaatatcattttgaacgggatcttattgattatcggatataaatttttagacggaaaaacaacgctttatacgatcattaccgttgtcgccaactcactgtttctgcatctgacgcatgattggcactcgccttcacatgaactcattattaatactatttttgcgggtgtgtttgccggtgtcggaatcgggatcattattcgagtcggaggcacgactgcgggttctgccattttggcgaggattgcgaacaaatatctcgattggaatatcagctatgcgcttttgttctttgatctgattgtcgtcttcagttcttatttcatcatcggtgcagaaaaaatgatgtttaccattgtcatgctgtacatcggaacgaaggtgatggactttatcattgaaggcctgaatacgaaaaaagcggtgacgattatatctgagcataagcacgaaatcgccgaacaggtcaacacgcttatggacagaggggttacgctgctgtcgggtaaaggaaattacacggggcagtcgaaggaaattttatatatcgtcatccagaaacaagagctttccatgctcaaaaaaattattaaaagctgtgatacaaaagcgtttgtcattgttcatgatgtgcgtgacgtctttggtgaaggcttcgtcgatatctctaaataaaaaggatccctctgccggcgcggagggtttttttcttatgccggcagaagctgttatgatccgtttcccgggaaatagcctgaaagctgtttcttaaaacgaagtggatacaatcggccggacgttttatactgacaatatgatagagcgatagagaggagcgcatatgaacccgttattggcaatttacccgagggctgtgttgtctgatacgtgctgtacggcggaggatgtcttttgcttttatgatgagaaaaggcggatctatgtcgccattccgaaggaggatatcaccccgaaggagaaactgcttctggaatcacttttgacgcccgctgaagaaaaaggcgatttttttccggagacggcggcagcaaagaggtggcggcggtttctgctggaagaaggcccggtgcctgatgtcaaggagccgcgtgtccgttttatccattatgacttattgggagaacgggactggggggcatttacggaagcgctgcgccatttctggccggtttcatatacagttgtccggacgggaagggatcagggcgtgattgtggaggaagaaaagctggaagcgccagattcggatgacatcgcatcttttgtgaagattctcgaaggcgatttttatttcagtgtccgttttttcatcggaaggtattatggcgcgggagaacgtctgcgccttcattatcggagagaacagcaatattgtcagattggccggcgtcatctcccgcagctgagcacgctgaccgcggaaacggtatttccggctatgctcatggaagaaagcagagaaaagctctcagccttgcttcacgaagaagcggtgctgctgtttcagaaagaaccggagctgaagcatacgattcagacttttattgaacataactcgaacatgtcgctcacatcgaaaagactgcatttgcaccgtaacagtcttcaatatcggattgataaatttgcggaacgctcgggtattgatattaagacatatctgggcgccctgctggcttatttcatttgtctgcagtatgaaaaatcacattaaatgggaaatgtgcacgaaggcagcggactttttttatgaacattgcctatatccgccgccgtctgacgctgttacaatcctattaaagaaagcgtttacaaaaagggggagatgacatggcggaacttcggctggagcatatttataagtattacgatcaaaaagaagcggctgtcgatgattttaaccttcatattcaagataaagagtttatcgtgtttgtcggtccgtcggggtgcggcaagtcgacaacattgcggatggttgccgggctggaagacattacgaagggcgatttctatatcggtgacacgagagtgaatgatatcgctcctaaagacagggatatcgccatggtgtttcaaaactatgcgttatatccgcacatgacggtctatgataatatcgctttcggtctgaagctgaggaagatgccgaaacctgagataaaaaaacgggtcgaagaagcggcgaaaatgcttgggctcacagagtatctgtaccgcaaaccgaaggcgctctccggcgggcagcggcagcgggttgcattaggccgggcgattgtcagggacgccaaagtgttcttaatggatgagccgctgtcaaatctggacgcaaagcttcgggtgcagatgcgggcagaaattattaagctccaccaaaggctgcaaacaaccacaatctatgtgacgcacgaccaaacagaagcactgacgatggcgacacgcatcgtagtcatgaaggacggaaaaattcagcagatcggcacaccgaaagacgtgtatgaacatcccgaaaacgtatttgtcggcgggtttatcggctccccagcgatgaactttttcaaaggaaagctgacggacggcgccattcagatcggttcagccgctctcagcgtgccggatgggaaaatgaaaatgctccgggaaaaagggtatgccggcaaagatgttatcttcggcatccgcccggaagacatacatgatgagctgattgtggtagaatcctataagaagtcatccatcacagctaaaatcaatgtcgcggaattgctcgggtcagaaattatggtttattcccggatcggggatcaggattttatcgcccggattgacgcccgccatgacatacgtgccggtgaggaattgaccgtcgctttcgacatgaataaagctcacttttttgacagtgaaacagaaatcagaatccgctcataacgcaaagccggacagctggatgtccggcttttttgatgtaacaatttatgacgcataaccgatataaaaagtaaatagaagacagaaagcaggaaaacgatgaaacgcatgatcatgtgcatgtgccttttggctgccgtgtttacgcttgccgcctgctcgggccatgaggcaagcgccgaacaaagcattccgaaggcagaagcgcaccacgataaaaagtctgtaaagcgccaaatcaaaaaagagccggatacgtccgcctgggttcaaacgaaaggaacggcaagactgccgattctgatgtaccacagcatttctgagggaaacagcctgcgtgtgccgaaggaagaattccggcagcatatgaagtggcttcatgatcacggctattatacgatgactcctgaagaggcctatctgatgctgacggaggataaggagccgcgtgaaaaatgtgtgctgatcacatttgatgacggctataccgacaatgtgaaagcggcctatcccattttaaagaaatacaagatgaaagcgacaatctttatgatcggaaactatatcgggcataagaatcatctgactgagaagcagatgaaggagatggccgcccacggcatttccattcagagccatacgatgaaccatctcgaattgaacgggctcacaccgcagcagcagcgacgtgaaatgaaggactctaagcgtttatttgatcaaatgttcgggcagcggacgtctatgatcagctaccctgtcggacgatataataaggaaacattaaaagccgccgccgcgtcaggctaccgtatggcggttacgacggagccgggagcggcgtcaagagatcaggggctttacgggcttcaccgcgtccgtgtatcgccgggcatgtccggggcggcattcggctcttatattcaaaatgtgatgaaataacagagcctccgcatatgcggaggcttttttcagtttaatagaattgatgaagcagcagaagggtgacactcacggtaatcgctccgccgattctggtcgacacttgggcgaacggcataagctcaagccgttcagcggcgctcaagatcgcgacgtcgccggtgccgccctggccggaatggcaggcattaataatcgccgtctcaatcgggtacagattcagccattttccgatcagaaaaccgacggccatcatcgtgacgacgatagataaaatggtaatgatgttgctgatcgtaaacgccgcaatcagcttgtcccacggtgtcattgaaacgccgatcgcaaataagagcggataggtcacggctgtcgagaaaaagcgcgagacgccgaaggctccgttttcaatcgaagccggcgccagcctgaacagcttaatgagaacggcaaggacgagcatcacgacaggagccggaagctgaaagaaatcatgcgccagcatgccgactaaatagagggaaaccgctaaaataccgcccgaagcgaaaaaggacaaatcaaacgttttatcattggccggctgttccaatgcgggagcggaatgatcagacttatcaaccttcccgttgcccgtccattccggtttgcgtttcccgatgacattcagcaaacccgataacataatggcgcacaggctgccgagcatgatggacggcagcacaagcgcaaaggcgtctccctgggacatcggcataatatcggagtagccgatggataaaggaatcgcgccttcaccgacaccccccgccataatcggaacgacaatataaagcagtgtgtgctgaaagccgagcccgagaagcgtcccgacgcataagccgacgatggcggccgcgatcgagccggcgatcagcggaataaaaatcttgacgaaagctttgacgagcgtctctcttttcatcccaagaatactgccgacgacgataccggcaataaataaatagagaaagttggagctttctgtgaattctgttgttgaagtaataatgtctttcggaagcaggtggtagtagacgacagcggatggaataaaggttgcgagaatcgcagggccgccgatggaacgcacaatcggaatggattttccgatctggccgaaggtaaatccgaaaaaactcatgacggcaattgatgtcagaatgtcgcttttaacatcacggctcatgacaaacaccgtaataagcaagaaaagcaggatatagataggaagaggaataatgccgattcttatattcattgctctggcaaaccagttatcagtccgttcctgtttttggattgaatccgtttgcaattttggttgaagttctcccatgcttgttcccccagtcgttatgtagtgaaaaaatatccccatttaaagtatactaaaaaatttaaattgttcatatattatgaatttactagggggcatgctttcttcacattttctttctcaaaatggcgatttggcgggctttttcaccgagaaaagcattttgttcgccacacgaataaaaaagaggtacgatatcaaagggacaaatatcctaggtgctgacataaaatctctacaaatccgacaataatcggtcacaatttcagccttattttaggtatattgatctttttttttaggctgaatcgttgtaaagtaatgatattgaatcatttctatgacagccgctgtcccccagggtgtacaggctgatatttcaatagttttgacgaatttgtgaaacattgagcaaatatatcattttttgtgaaataccgagcaatgatttcgctatgtttgtgaaatgttgagcaatttaccagattggaggaaaaacatcatgagtgagttggtattagcccgcattcaatttgcatctacaacattgtttcacttcttgtttgtgcctttgtctatcgggcttgtgtttatggttgctttgatggagacgctttatgttgtcaaaaaacaagagacctatctcaaaatggctaaattttgggggcatctctttttaattaacttcgctgtcggcgtcgtcacagggattcttcaggaattccagttcggattgaactggtctgattattcccgttttgtcggagacgtatttggggctccgcttgcgattgaagcgcttttggcgttttttatggagtctatttttatcggattatggattttcggctgggaccgtttatctaaaaaagtgcatttgctttgcatttggcttgtatctttcggaacgattatgtcatctttctggattttgacggcaaactcattcatgcaggagccggtcggctttacgattaaaaacggccgagcggaaatgaatgatttcggggcgcttttgacaaaccctcagctttgggttgaattccctcacgtcattttcggggcgcttgcgacgggtgctttctttatcgccggtgtcagcgcatttaaattattgaagaaaaaagaagtgcctttcttccataaatctttcaagctttcgatgattgtcggtctgatcgccggtatcggcgttgcgttcagcggacatatgcaggctgagcatttaatggaatcgcagccgatgaaaatggctgccagtgaagcgctttgggatgacagcggtgatcctgccgcgtggacggcttttgcgaacattgatacgaataaagaaaaaaacacatcagaaatttcaattccttacgcactcagctacttggcttaccagaagttcagcggcagtgtgaaagggatgaaaacacttcaaaaagaatataaaaaaacgtacggaaaaggcgactatatcccgcctgtcaaaacgacgttctggagtttccgcattatggcgggagcgggcgcgcttatgatttttgccgcgattgccggctttattctgaaccgccgcaaaaagcttcatacgagcaagtggtatttacggggcatgatcgcgctgatcgcattcccgttcattgcgaactctgccggttggattatgactgaaatcggccgccagccgtggacggtcatggggcaaatgacgaccgcacaatccgtttcgcctaacgtaacgacgggatctctgctgttttcaattatcggcttcggcgtcatgtacttgattttaggcgcgctgcttgtcttcctattcgttcgtgaaattaaaaaaggtgcggaccatgatgatcacaaggatgttcctgtatcaacggatccgttcagtcaggaggtctaccatggggtcacttcatgatctttggtttgtactcgtttcagttttgtttgtcggatttttctttttagaaggttttgacttcggtgtcggcatttcgacccgatttcttggccataatgaattagaacgcagagtgctgattaacaccatcggcccgttctgggatgcgaatgaggtatggctgctgacaggtacgggagcgatcttcgcggcattcccgaactggtatgcgacgatgctgagcggatattatattccgtttatcatcatccttcttgctttaatgggacgcggcgtggcgtttgaattccgcggaaaagtgaatcatttaaaatgggtcaaaacatgggactgggtgattttcttcggcagccttatcccgccgtttgtattcggccttatcttcacaagcttgttccgcggcatgccgattgacggccatatgaatatgcatgcgggtttttcagatattgtgaacgtgtattccgtccttggcggagcagccgtcacccttctttcattcctgcacggtttaatgtttatcaccctgcgcacgatcggtgatttacaagagcgtgcgagaaaaatggcaaaacgcgtaatcggtgttatctttcttgttgtacttgctttctttgcgatgtctgcatacgatacggacatgtttacacgccgggcaaacatcacgattccggtattcgtgctgattgtcatctgcaacgttcttgctgttgtgttcatgagcaagaaaaaagacggctgggcattcggtatgaccggcgcgggtcttgctttgacagttgcgatgatttttatctctctgttcccgcgcgtcatggtcagctcgctgaaaagcgcgtatgacttaacagtagctaacgcgtcttccggtgattattcacttaaggtcatgacaattgccgcactgactctgctgccgtttgtcatcggcagtcagatctggagctattatgtcttccggaaacgcgtcagccataaggagcctatgacttattaatgggaaaagacctgtttctttataaaggaatgaagcggattcttgcgatcattacgggattaacgattatacaaacggctgccatcatcttgcaggcggaatggctgagccaggcggtaaccggattatttaacgggaagcggattgcttctctttatccggttatcggctttttcctgcttgcgtttttggtccggcatgcggtgacagcggtccggcagaaaatcgtgtaccaatatgccgcgcaaaccggcgcagacgtaagaaaaagatttcttgagcaattgttccgtctcggcccccgctttgcgaaaaaagaggggacaggccggatggtgacgctggcgatggaaggcatcagccagttccgccgttatttagagctgtttctgccgaaaatggtcagcatggcgattgtgccggcggccgttgtcatttacgtgttttttcaggataaaacatcggcattgattctgattcttgcgcttccgattttgattgtatttatgattctgctcggacttgtcgcacagaaaaaagctgatcgccaatggaagtcctatcagacgctttccaatcatttcgtggattcgctccgcggactggagacattgcggtttttaggattaagcaaatcacacagtgaaaacatctttcatgtcagtgagagataccgcaaggcgacgatgagcacgctccgggtcgcgtttttatcatcattcgccctggatttctttacgatgctgtcggtggcgacagtggcggtgtttctcggcttgcggctgatagacggacaaattctgctcgggccggcattgaccgcgctcattctcgcgcctgaatattttctcccggtccgcgaagtgggaaatgattaccacgcgacgttaaacgggcaggaggcggggaaaaccattcaagcgattttggcgcagcccggttttaaagaagaaaagccgctcgaacttgatacgtggactgacggggatgaattacagcttgcacgtttgtccgtccgagaatcgatgtctgaatttcatctgtccttcaaagggaagaagaaaatcgggattatcggggaaagcggtgcgggaaaatcgacactcattgatgtgctgggcggctttttagagcctgcgtccggtgagatcaaggtaaacggtgaatcccgctcgcatctgcagtcggacggctggcagaagcagctgctttatattccgcagcacccatacatttttgatgacacgcttttgaataatatccggttttatcatcctgatgcttcgcgtgaggacacggcgcaggccgctagatcggcgggtctttccgaactgatccgtgatctgcccggcggtcttgacggccggatcggcgagggcggacgggcgctcagcggagggcaggctcagcgtgtcgcgctggccagagcctttttaggaaaccggccgattctcctgttggatgagccgaccgctcaccttgatattgaaacagaatatgaaataaaagaaacgatgaaagacctgtttgaaaataagcttgtttttctggccactcaccgtcttcactggatgcttgagatggacgaaattatcgtgcttgatgacggcgcggtggcggaaatcggcacccacgacgaattgatggcgaaacaaggcgtatacgccaaacttgtaaaggcgcaactgggggaaagaacatgagaaaagaagaatggattctgccgtatatgaagcaaaatgcccgtttgtttgttcttgtgatttttttaggcgcggtgacgattttttcggcggcctttctcatgttcacttccggttttttgatctctaagtcggcggctaggcctgagaatatcctgctggtttacgttccgattgtagccgtgcggaccttcgggattgcccgttcagtctcacggtacgccgagcgtctgacggggcaccatatcattttgaaaatcgtgtccgacatgagggtgcggctttacaatatgctggagccggcctcgctcatgctttcatcccgttttcggacgggcgacatgctcggcattttggctgaggatattgagcatttgcaggatgcgtttttaaaaacgattttccctgcggtttccgctttgctgctgtatgcggcatccgttatcggactcggctttttttcctggccgtttgccgcttttgcggcgatttacctgtttatattggttgtattgtttccggttgtgtcgcttcttgtgacgagagcgaaaaacatgaggctgaaaagcggccggaatacgctctacagccggcttacagatgccgtgctcggcgtgagcgactggatgttctcgggacgccaggcggcctttatttcctcttatgaagagaaagagaaggcatggtttgatcttgaaagcaaacgtcagcggtttacgagatggcgtgatctcgccgcgcaatgccttgtcggcggcttcatattgatcatgctgttctggacggcgggtcagtatgcggacggcagcattgccaacacgatgatcgcggcctttgtgcttgtcgtatttccattgacggaggcgtttctgcccctttcggatgcgctgacggaagtgccttcttatcaggattccatcaatagaatgagtcaggcggctccggagctgcgaagtcgtgaggtgaagcagacagatgagaaactggatgtatctgatgtgacacttacatttgataacgtgacgttttcttatgatcagcactgtcatgtgcttgaccgtttttccttcactctccgccaaggtgaaaaaatggcgctgctcggcaggagcggctccggtaagtcgacctctctcgctttaattgaaggcgccttagttcccgattcgggcaaagtgatgctgaacgggctggaaactgcggccgtgcaggagcagatttcctcagcggtggccgttttgaatcagaaacctcatctctttaacacgagcattatgaacaatatccggctcggaaacggcaaggcgagtgatgaagatgttaagcgtgcggctcggcaagtgaagctgcatgattatattgaatcactgcctgacggatatgaaacgtccgtgcaggagacggggattcgtttctcaggcggggaacggcagcggatcgcgcttgcccgtattctgctccaagacacgccggtcattatccttgatgaaccgacggtcggccttgatgcggtcacggaacgcgaattgcttgatacgatttttgatgtctttaaagagaaaacgatcctctggattacacaccatttagcgggtgtggaaacagctgataaaatcgtctttttagaaaatggaaaagcagaaatggaaggaacccatcaagagcttcttgcagaaaacgaacggtaccggaagctttaccgtcttgatgttccggtcagaacataaacagccgcaaacgagcggctgtttttttgtgcggtttaaaatctcttcttgtttggaatataaataggagacagaagaggaggtacagagatgaatataatggattggacggaacaggatgtgaaagatacgctgccgaagcgggaggcagacagccataaggggacgttcgggacggcgttattgctggccggcagcgaagacatgccgggagccgcccttctggccggattgggcgcgatgagaagcggtgtcggcaagctcgtcatcggtacatcggcaggcgtcatcccgcttatcgtcccggtgctgccggaagcgacgtactggcgtgacggctggaaaaaagccgcggcgggccagcccggggaaaccatccgggccgctgccatcgggccgggccttcctcaaacagacgaagtgcagcaggcggctgatcagctgctttctgccgattatcccgtcatactggacgcgggcgccattacgaaaagaacctatccaaagaggaaagcccccgtgatcttgacgcctcatcccggcgaattttccagaatgacaggccttccgattcaagagattcagcagaacagagcgggatatgccgcagaatgggcggagcggcttcacgtcacgattgtcttgaaaggaaacgaaaccattatcgcttttcccgacggggaatgccgcaggaatacaaccggaaacggcgcgcttgcaaaaggcgggaccggcgacacgctgacgggaatgattctcggcatgctgtgctgtcatcaagacccgaagcatgccgtattgaacgccgtccgccttcacggtgaatgtgcggaggtatggacgaaagagcgctccgcccataccttattggcgcacgaactttctgaactgctgccgcgtgtatggaaggaatatgaataaagaaaaggcgtcttcatagagaaggcgcctcttgttgttttacccttgatttcatcaggacataatacagcagcgacggaacggccaggccgatgacccaggcaatgtcgcctccgccgaatatttcagcgagcggcccgatgtaaaaggatgtattgatgaacgggatttctaatataatcgacaaaacgaaggcggccgctgtaatccaattgaccctgccgtattgcccgttgacgtcaaacatcgatttgacgtggtattttccgcggcggataaaatagtaatccacgaggttgatcgccgtccatggaattaagaaataactgatgaaaaagatgaaatttaaaaacagttccatgaaattgctttggcccaagagacttaatacagtacctgctgccgtcacacaaagaatcattaccactctcgttttcggcgtcaccttcagttttaaaaacggctctaaggtagtcgtcgttgacataaaggctccgtataaattaaagacgttgatcgccatttgcccgaacaggacgatgatcagcataataaaggaaaacggaccgaacaatcggacaatctcatttcccgcattagcggtaaattccgggagcgccgtcgtcaaaatggcgccgagaagcatcatccagatggaactgactgacgtacctgcgtagctgtaccaaaaagtatgcgatgccggtgttttgaccggcagataacgggaataatctgcgacatatggcgcgtatgccagctgccatgtggccaccgcgctgaccgccactagaaaaacaggcagatctaatgagccgggcacccagcttcctgaaggaatcggcagttgaaaaataagaatcgttgcagcaaaaaaaacggcaaaggaggtccaagagaggattttctgcattttgtgaatcagatcatgaccgtagatcgtgagtaaaaaacagatggcgcttaagccgataatacaccatgaagccggaatcggtacaaagctgctcagtgtaccggctgcgagaatcgtactgctcgcaaagaagcccaggtagataaacatgaccaaaaagaggggcagaatcgccccgatcacgccgaattgcgcgcggctttgaatcatttgcggaattccgagctgaggtccttgtgcggaatgagacgccataaagattgcgccgataaaggtcccgataataatggcggcgatactccaaaagagatcgagtcccattgtaacgggcagtgtgcctgtgactaacgtcgtaatatgcatattcgccccgaaccagacggggaataaatctttagcctttccgtgtctttcgtcatgcggaatatgttcaatcgttcgcctttctactttcaatagataatctcctccgtatgttcttctttaacataaagacatagcttaacagattgacctgccgtttacaaattccagcatgcaggaaaaacattgtaaagcctcgctgacagccgtcaaagggttttttgaaaaacggaacaaacactgccgccaaaacgatttgccagggtttaaaaggcatggatatgcttacggactaatatgtattaaggagaaatgtgtcaatcttttgacgaatggagccattattcgttaagctgaaagaatagtttactttgtgtaaatttcattaatgaaaaggggattgatgatatgtgtacaagtcttacattgaaaacgacagacggtaatcacctattggcgcgaacgatggattttgcatttcagctcggtacggacgtcgtgctttaccctcgtcagtacagctggaaaagcgaagctgacggcaggatgcataagacgaaatacgcatttatcggcatggggagaaatctcggcaatgttctgtttgccgacggcgtaaatgaaaaagggctgtcgtgtgcgacgctgtattttccgggctttgcgggatacgagaaagcggaacgggagggcacctgtcacattgctcctcatgagtttgtcacctgggccttatcaaactgtgaatctcttgaagacataaaggaaaagctctcaatgctgacgattgtagagaagaagttaatgttattggatacggtgctgcctcttcattggattttatcagaccgcacgggcggctgcattgtcatcgagccgacaccggagggaatgaaagtatatgacaacaaacccggagtgatgaccaatagtccagaatttccttggcatgtgaccaatctgcgccattatatcggaatcaggccgcagcagtcagaaagcaaaacattgggcggaatgacattaaccgctttcggccaaggatctggaacgatcgggcttcccggtgattacacgccgccatcccgattcatcagagccgcttatctgaaagagcatttagagcctgctgctcatgaaacggatggcgttacggccgcttttcacgtgctgtccaatgtgaatattccaaaaggcgcggtgatcacagaggagaatgaaattgattatacgcagtatacgtcggtcatgtgctgtgacaccgggaactactactttcatctgtacgacaaccggcagattcacaaagtaagtttattccatgaagatcttgaccgtccggagccgaaagtatttgcggccgcggcggagcagaatatacaggagctgaattagctcaaaaaaaaacaggacgcgattgtcctgtttttttatttaatacggatcagacggatggctttcctgttcagcctgttttgcggcttgtgctgtatcagtagtgccgatcggcccgccgctgttgctttcggaggcttttttcagcccttccgccacacgttttccgtagtccggatctgcttttgtgaaattctcaatcatttgatcctgaatgtctttccggcaggaagaaagcgtattgaccaggtttgtgatcaattcgttccgttcaaattccgaaaatctgcggtatgtttctccggcctggccgaagttattcgaccggtcgatcgcttcccgcttcacatcgccttcgacatgaggtgtatggtctttcccatcctgctttgcttcgttgagtcctcccataacggacggctcatagttgacgtgcgggttttgtccttctgcccgatcgacccgatactgcatttgcccgccttcctggttggtggcgacatgctttttcggcgagttgatcggaagctgcaggtagtttgcgccgacgcggtaccgctgggtatctgaataggagaatgtccgcccctgaagtaatttgtcatccgaaaaatcaaggccgtccacaagcacgcccgttccgaatgacgcttgttccacctcggcatggtagttttccgggtttttgttcagaaccaatttaccgatcggcttccaagggaaatcgtctttataccacagcttggttggatcaagcggatcaaaatccagctcggggtgttcgtcatcagtcatgatttgcgcatacacttcccactcagggtaatcgcctttttcaatcgcttcatacaaatcctgtgtcgcatggttaaagtttttcccctgaatctcttccgcttccttctgtgtcaggttgcggatgccctgtttcggttcaaagtgatatttgacgagcactgcttttccttcttcattgacccatttgtaggcatggacgcctgagccctgcatctgccggtagttggccgggatgccccacggcgaaaacaagaatgtgatcatatgagtcgcttccggtgattgggaaatgaagtcgaaaatacgctcgccgtcctgaatgttcgtaacgggatcaggctgaaatgcgtgcacaagatccgggaacttcagcggatcacggataaaaaagattttcaagttgttgccgaccagatcccagttgccgtcttcggtataaagcttaacggcaaaaccccggggatcacgcaatgtttccggggaatgctttccgtggttgacggtagaaaaccgcacaaacgccggagttttcattcctttcttttgaaacactttcgctcttgtgtatgtagaaatctcctcgtctccaaaacttccgtacgcctcaaagtatccgtgtgcgccggcgccgcgcgcgtgaacgacgcgctcgggaatccgttcgcggtcaaagtggctgattttctccaaaaaatcataattctccaatgtcgtcggtcctctattgccgactgtcctgacattctggttgtcagtgaccggatggccctgccggtttgtcagcgtgtcttctgactcgcctttaccggtcgtcttactggaaagcgtttcttcgctgtttttgttattttccattgttgaaccctcctttttgaacggtaacaatatgcccagcagagccgtttcttaaaaccgattttcaaaagaagcagttattccgtgatcggcgtcaaggacccgccgttccatatttcgcccttgttcagcgtccagctgttttgataaagggcctgcgcgccttggttggccgccggacttaattgttcatcccatgtcaaaaagtacgtggtctcgggatacttttgcctgatcgcattgataaaagcagcataatcaaagcttccgatattgccggacggaccggtttcggcaaaggcaaacggttttttcagagacagcatttcatcatagcctgatatcgcatacggatcagtgaagtaagcgtccagaccggtaatatccacataagatgagcctgggtaaaagtctgtcttaaagtctctgttggcatccggcgaatacacccacaaaaggttatccaaccctcttgtctctgtcatatagcggtatatcttcttgtaaagctctttgtacagcgagattctctcattgtctttttggttgtagcctgtcagcccccaccagaaccactcgccgttcatttcatgcagcggtctgaacagaacggtgacgtcttgatttttcagctgagtaaggccgtcggcgattttgctgagcagcgcctcaagccgttttccttcaacagttgaagggtccagaatgtttttgtactggctgtttgagatggccgttttatagtttccggatggaaaagccggatttgcgagatgcaggctgacctgagggaggccgccgcttttccagtatgagattaagctgctgttgcagctgtaatcgatagaatcggtgatatccgctgtttcaagccatcctctcccatagtcacagccgtagatggcgggagactgtcccgtcgcgtttttcaagcggttttcctctgtcattgaaaaagtgacatcgctgtacccgccgaacgccccggacatgaccctgttttctgaacggttgggcaggtgcgccagccagttcatgatatcttttgtcgtctgctgggcatttgggttgacgggataaacggtgtgagccgatatcggactggcggctcctaagagtaataaaacgatagacaggcagactgctaactttttgagcatataaaagacctcctgatttttaagatgatgaaggatgtgaaacgataacctcacaatctccttctataacaaaatctccggaatccgccggcacgataaagtgatcgcctttgtgaatggggcatccatccagttctccgtgtcctttcatgacgcttgcgagtaaataccggccgggtgcggggaatgatgctttcccgctcacatcccattgataaactgaaaagaaaggtgtttcggcgagtatcgtaataagagcatctccgatccgatgctttgtgctttttacattttcatcggtatggggaatgtctgttacgtcaattgctttctgaagatgaagctcgcgtttattcccgttcccatccgtccggtcatagtcgtaaagccggtaggtggcatcagagctttgctggatttcaagaacgagcgtaccttcacataaagcgtgcagtgtgccgctcgggacatagaaaaaatcgccgggcttaatggggatgcggcggagcaggtgatcccactcgttttgttcaatgagccgaacgaagccttctctcgtttgggcgcgatgccctaaaatgagctccgcgtcttttttgcagtccaacacgtaccagcattccgtttttccgagttctccgttttcatgccgatgtgcatatgcgtcatccggatgaacctgtacggataagtccatatttgcgtcaagaatttttgtgagcaggggaaaagcttcttctttcggatgtccgaacaggtcagggtgttcactccagagacgctgtaatgatgttccggaaaaaggcccgttccgcacaatggatgtgccgtgcggatgagctgaaatcgcccagcactctcccgtccgctcagaaggaatctcatacccgaatgtatcgcgcagcttcgtcccgccccataatctttctttaaaaaccggttccaaaaataagagtttcgtcatttttccgcctcccggtttgccgcctttaatgcgcgctccgccaatacgagcgaaccggccgcgccggagtgaatccctaattgagggggaacgatgaagtgttcaatgtcgggcagatcaatatattgattcagccgctttttcacgtgctgacggatagaagagaacagctgccgctgcttcatgacgcccccgccgagaatgatcttttccggcgaaagtatgagaatatactgcacaagcgcttcggcaatataatagccctcaagctcccacacttcctgctgatccgtgagcaaaaatgcttttttcccccagcgtttctcaatggcggggcctgccgcgaggccttccagacaatctgtatggtatgggcaattgcctttgtagccgtcgtccggatgtcttctgacataaatgtggcccatttcaggatgagacagcccttgaacaaatctgccgttcatgatggcgcccgcgccgatgcctgtgccgaccgtcaaatagaggcagctgtccgcgtttttggccgcgccgaaagaagcttctccaagcgccgccgcattaacgtcggtggtgaagcctgcgggaatatccagagcgcttttgatcgtttgaagaatagggcagttccgccaggctgtcttcggcgtcgcggtgatgcacccgtatgtttgactgtcaggacggatatcaatcggtccgaacgacccgatgccgatggcttctatcgggaaatctttaaagtaacggatcacctgtctgagtgtgtcatccggttctcccgtcggaaactctactctgtccagaatggtgccgtctctttgtccggcggcacagacaaatttcgtgccgccggcttcaatacctccaagcatggccgtccctcctcatctgttaaaatccgttttgatcggaaacggatttgaaccagcggccgctttttttgacggtccgttcgcccccgttttccagattgacagatacaaagccgtagcggtttttataagcatttgtccaagaccagttgtccatgaaagtccacaggtgatagccttttacatttgaaccttctccgatggcccgatgcacccatttgagatgttcctggataaattcaatcctgtaatcatcctgaatgatgccgttttcatcgcggaagcgttcctcgccttctacccccatgccgttctcagaaataaaacactcgatatttccgtaatgttctctgagattggtgagaatgtcgtagattcctttttcataaatttcccacccgcggtgagggttcattttccggccgggcatgacatacgggtcgaagaaacgctcaggcaggaaaggggcatgcggattcggaacatgttcttttgccttgacgcgcctcggctggtagtagttcacgcctaacaggtcgaccgtatgctcctgaatgaggcggagatcttctttctcataatgcggcagaaagccttccgccttgagaatctcgacaagctcctcaggaaattcgccctttacggcgggatctaaaaatgaacggttgaaaaaggcgtcggcaatccgggacgctttgatatcttcaggatgtgagcttctcggataagaaggcgtcagattcagaatgattccgatttgtccatcctgtttcaattctctgtaggctttgacagcccttgcattcgacagcagggtatggaagccggcctgcaccgcttcttgaaaattaacgtgattcgggtagtgaaagtcgtataagtagccgccttcaatcggcacaatcggctcgttgtgagtgaaccattttttcaccttgtcaccgaatagcgaaaagcaggttttggcgtaatgttcaaacgcgtcaacggtgttccggctgacccagccccccttacgctgaagggcgagcggcatgtcaaagtgaaacaaattgacaaacggctcaatgcgatgggcaagcatttcatcgatgacgtcctgataaaacgcgaccgctttctgattgacctcgccagttccgtccggaatcaatcttgaccaggaaatagacagccggaaggagttatggccgatttctttcatcagccggatatcctccttgtattgatcgtaaaaacgtgacgtgtcgccggggccgacgccgttaaaaaaacggctcggctctttttcataccagtaatcccatatgttttggctttttccgtctctgtcagcggcgccttctgtttgggtggcggaggcggaagacccccaccagaatccttccggaaaacgatattgaatatttgattcagtcaattggtttctctcccttactgcgattttgattacatactcatgctgtcatcccgggcatgctgctcggtctcagcttctttttcctttgccatgtttaatttgtccagcgctttaagaaacgggaaccagatgacaaacacaatacagaggttgaccagctgcataatgccgcccatgacggaattggtcgccataatcccgttaatgaaaagggggacggtccaaggcacggtcacgccggtaggagggggcacgatccccgccgacatggccaggtaggtgacaagggtgacaaccatcggtgcgatcacccacggaatgataatgatcgggttcatcacgatcggcaaaccgaaaataaccggctcattgacgttgaaaatgcctggcgcgagaccgagtttggatatctgtttcatctgtttgcttttcataaaaagcaagatggcgatcactatggccaatgtcattccggttccgcccattccgacggtgtaaatctccataaacggcttagaaataatatggggaatctcttttcccgctgtatacgctgccaaattttcgacctgtaatgtattccaaatcgggtccatcacggaattgataatgatttgtccgtgaagtccgaaaaaccataaaatctgaataaagaaaacagcgattaatgtaggaatgatgccgcttccaagtccgacaagcggtgcttgaaccgtatgataaatgacatcatgcagattggtgtgaaagatctgggtgacagccgcattgatcaagaggaagacggtaagcgtgataaaagccggaatcaatgcggcgaacgatttagcaacagccggaggaacaccggcaggcatcttaatcgttaagtttctctgaacgattcttctgtagatttcacctgacaaaaacgcggtcatcatgccgagaaacatcccttttgctccaagccggtcaaccggaatgacgcctgcgaccgctttgcccgtttccggctctaaaacgaacggggtgagcagcagaaaagaaaccaatgcgatcgctccgccgaatacggcctccacttcgtagcttttggaaaggtaatagccgatcccgaagacgacaaaaatggacataatccccatcgtcgccgtcgaagcgccgccaaatccggattgaaagacagacagggcggagctgctcatgattttgtttaaaaacggcaggttcgtcagcacgacgaacaccgaaccgaaaatggtcagcggaaacgccagcataaaagcatcccgtaagacttgcaagtagcggttattgtttaatttgcccgcgatcggaacaaggaattggctgattttctcaaacacgtcttcacccccggctttttataaattctttgattgaaataaatcgagcatttctttgacgagctctttcattgaaagcgctgacattaagtggtcttcagcatgcataaaaagcagagagacatccgtcttggcgccgccggcttctttttgaatcatctgaaaatggatgtcgtgcgctttccccagttcttcttcagcctttgtcagaaaggtgtctgactcatctgtccggccgtctttatatgcgcgtatcgattgaataatattgctgcgggcattgccgctgtgaagaatcagctgaaaactgatctgttcatccgtgtacgtttccatgcttatcgcctcctttatttgttctcaatcaaggcaacggcctgttcgtatgcttttttgccatctcccatgccgtatgccatcatatcaatcacatcaacggtgatgtgaagcgggtccgcctctttctgaagctcaccttttaaaaaactcatctgcgggccgatcagtacgacgtctgcatctttcatcgcttcttttgctttatcctgtccgactgcccaaatctcggcttcctcaccgatggagcgggcgtaattctgcattttcgtaacaagaaggctggtggacatgcctgagctgcaggctaataaaattcttttcatgaggaatcccttctttcataaagttaaaacgttttcatgaatattataatcttttgaaattaaatgtctatacttttaaaatataaagttttacttttcggatttttgacacaaaaaaaccttttaagattcaacttaaaaggtttttcatctcaagcgagccataacagccataaataaagtccgatcaaggtgatgaataacgtcggaatggttaatatcagacctgtcttgaaatacattccccaggaaattttcacgtttttccggctcagcacgtggagccataacaacgtcgccagcgacccgatcggcgtgatcttcggcccgaggtcagaaccgataacattcgcgtaaatcaatgcctctctcatcagcccgtgagtgtccgttccgctgatggctatggcgtcaatcatcaccgtcggcaggttattcataacggaggagaggatcgcagcgataaaacccattccgagtgtgcccgcaaacaatccgtgatccgccgctttctgaataagctgagaaagaagatccgtcagtccggcattccgcaagccgtacacgacaacatacatgccgacagaaaaaaacacgatggcccacggggcgtccttgatgacttgtttcgcagggacggcggggcttcgctgggccagaatgagaaaaatgaccgcgatggagccggcaacgaaggaaacgggtatcgacagcagttcgctgacgaaatatccgatcaataaaacggccagcacagcccacgataaccggaaaaggcgttcatccttaatcgcggatgccggatgtttcacaagaccggtgtcataccgtttcggaatgttttttctgaaatagagatacagcaccaaaatgcttgccgccagagaaaaaaggttgggcaccagcatgcgtgatgcatattcaatgtatccgatatgaaagtaatcggcggatacaatattgaccaaattgcttacaacgagcggaagcgaggtggtgtcggcgatgaatcctccggcgataataaaaggaaaaaccagcttttcaggtaaattcaaagcccgcaccatcgccagtacgatcggggtcaaaatgagcgccgctccgtcattggcaaacagggcggagacaacagcccctaagaccgacacatagagaaacatccgcagcccgctgcctttggccgccatggccatatgcagcgcggcccactcaaaaaaaccgatactgtcaagaatcaatgaaatgataataatggcgataaaggcaagtgtcgcattccagacgattcccgtcacttccgcgatatcgtgcaggctgactgctccggcgatcaaagcgaggaccgctccgccgcaggcagaccagccgattgatacatgtttcggctgccatatgacaaacacaagtgtcagcacaaaaatcagcgctgataaaaccgcaactcccaagaatatatcccccttaccggcatgtaacagtgacttctttttgccgcaatgtctgtaaaacttcgtccttttcatctatctgctgcagaatcgagcaaaccagcgcgtattccggaccggacggatgaatggcatagtaccgccactgaccctcgcgtctttcccgcacaaggccggcgttctttaatttccgcaagtgctggctgatgccgggctgacttatatgaaaaatagctgtcagctcgcagacacaatattccttatccttcagaagcttcagcatcaaaagcctcgtcgggtcgcttagaagtttgaggcactggctgatcccttcggaacttaaagcatgatgcctccgttccatgcgctcactccttttttacactattatataagcagatgtttatataagtaaacgacaatataaaaaagccggccttgcactttttgcaaaaccggctcgtgtttatttttggaacagttttttcgcttcatccattgctaatttatttcccagtgctgaataatcaagccaaggctgatcggcaattttatagacgtggtttgctttcacggccttcagccctttccatacagcgcttttttgcaattctttataggcttgctgtgacttgtcgtctctgttaacgacgacgaaaatcgcatctgcgttgtaatcaggcagcacttcttgagaaatgacttcataagggcgggaggtgttcatttctttaatgccgtcagccggtttcagcttcagatcgtcaaacagaatcggtcccatcggacggcgtgtgctgaagacgcgaagctcttttgcgttcacgcggatcgccatgactttggcgtttttccctaattccttattcatcatggatctgacttgttttgtttcatcttcgtaatcttgaataaatgttttcgcttctttttcacggttgacgatttttccgatgtcttttaaatgatcgcgccatgtgcctttatcaaggtcgaaaacgtgtgtgtttccgattttcttgtattttgacacatcttttcccgcaaattctttatcaagataaatgttgtctggattcagctcaagtaaagcttccatatccgggtctgaggcaggtccgagttttttcgtgtctttcagctgatttttcacatgagggagaaaatcttttaattctccgcccacgacggaaccggcaggtgtaacgccgagagccagcagatcatttgtcaggtgaatggacatcgaagcgattttatgatcgccggatttcttttttgactccggctgtgttgaatcggattggcaggcagccaataagaaaatacacatgaaactgatgagcgcaattatttttttcatgggaatactccttgttttatgatttgattttcatgacgagatagagaaaatacggcgcgccgatggctgccgcaaccacgccggccggaatggcgttcggctgaaacaatgaccggccgatggtgtctgccgcgacaagaatgacaagtccgattaatcccgcaatcgggataatatgctgatgcatggtgccgacgagccgtcttgccaagtgaggggcggcaaagccgataaagccgattcccccggccatcgcgacgctcgcgcaggacaagccgaccgctatggcgatcagcatgatcctttttctctgcacgtgtgcgccgagccccgcggctgcctggtcaccgagcattaaaatattcaaagagcgggcgttaagccatgcaagcggtgcgagaatgccgatccagggcaatagcgaccacacgtgaatccaatccctgccccagacgtttcccaccagccagcgggaagcgaatgtataagtttcttcattcagtcgcagcgacataaacaatgtaacggcgctgaagcccgcggaaacggcgatcccgactaacagcatgcggatcgttaaaaaaccgttcagcctgtcgtacgtaagcactacgatcagcagggcggcgagtgttccgcccgcaaacgtaaacagcgggatgaacatcgatgcctgcgcctccagggaatgaaagaacgtgatatacatcatcaaaccgaaggaagcgccggcatgcagtccgagaatgcccggatcggcaagcggatttcgggatacaccctgcaaaatagcgcccgacactcctaaaccgatgccggccagcatcgtcaccagaatccggggaagccggtaatcgaataaaacggttgtgctttgaaacgtgccgtatccgaacagcgtttttcccaccgtgagaggagaaagccggaatgagcccgtatgcagcccgatcagaataatgcaaacggcgatgaccagcagaatgagtcctgccgccgccgctttttttgtttctttctgcactttcatttataagtctctcccttccttgcgggcaatataaagaaagaaagggacaccgacaagtgcgaccataatgcctatcgccaattccctcgggggactgaccgtgcgcgaggccaggtcagccaaaatcaatagaatcgcgccgagtaacgcggacatcggaataatcagcctgtacgtaacgccgacgatctttcgcgcgatatggggaatgaccagcccgacgaagccgatcgcgccggcagcggaaacagacacaccggcaagaacgacggcgatcattaatccggcggcacgcgtcagagccgtgttcacccctaaattcgccgccacgtcatttcccattgagagaagggtgacggaccggcccatgaatgtcgcgagaatgatgaagaccgcaatcacgggaacaaggacttgtaaatgagcccacttgatccctgacaccccgccggcgtaccagaaggccaaatcctggcttaaatcgtaataaatcgccacaccggtactgagtgaatgtaaaagagcggctacgaccgccccggcaagcgttacttttaaaggtgtcatgctgccttttcccgccgcactgataaagaaaatcaagccggtgcttgccagtgctcccaaaaatgacatcaccatcagcagggcgtatgataaatgagggaaaaaagcaaaactgagcgcaacaacaaacatggcgcccgcgtttacgcctaagacacccgaatcggcaagcgggtttctcgtgacaccctgcatgagggcgccggctgcggcaaaagcggctcctgtaacggccgccccgagcaccctcggaagacgcaattcatgaatgatctgctggcccgttatattcggattgtaatcagcaacagccgaccaaaccgtatgtaaagtaatgtctttcgcaccgaatgagacggcgaaaaaaatagatacaagcagcccgatcacagcgatcaggaagaaaaccccgttttttaagatgctgatcagacggtttgcggacctgacagaatcgctcaaaaatcaattcacctacttttatgatcattatccggtatttattgaatatgagaatcattttcatttgaaccatcatattataccgagccgattttcaaaacgcaatagagcgttcaacaatgatgtcctttttttctctcatgtttatattgtaaaaaagaagtgaaaaacgtgaaagaggaaatcgctatattcagaaaggagggaggcaaatggcgggagaacaaaagcctttgccgattgaattttaccagagaccgtcagtggagcttgcccctttattgctcggctgtctcttggtgaaggagacggatgagggaacggcttcaggttttatcgtggaaacggaagcttatatgggagcggaagaccgggcggcgcacagcttcggcaaccggcgcacgaaacggacggaaattatgttccatgaggcgggccgcatttatacatacgtcatgcacactcatacattaatgaacgtcgtcgccgcggacatcggcattccgcaggccgtgttaatcagggcggcggagcctcatgaaggacagttcctgatggagagcaggagaccgggcagacccccgagagagtggacaaacggcccgggaaaactgacgaaggcgatgggcatttcaatgaacgactacggcggcatgatcacggaaccgccgctgtatattacggagggctttatgcctgagcatatatcaacaggcccgagaatcgggattgacaacagcggagaagcccgggattatccgtggcgctattgggtgacagggaaccgatatgtctcacgctgaccatgtttataaacgctgataacaggggaaagacaaggtaaaagaaaggggattcagacattgaaaaaatttttcaaaacgattatcaaatgggcgcccgtcatctatccgatcatcagaaaaatcataaaagaacggaaggcatctaagcggaaccgcatgtccgcatcccgaacagccggctgatccggctgtttttttacgggcttggcatcggattgccgcattgacttgaaatcctccccattatagaatttacatacatttaccccttcctcattctttttgcccatttttcacgtctgcatctgatctgataggaggtttttctcatgcttcatgggcggcttcgtgaacttttgcgcttgcttttagctgctgaaacaccggttacaagctcagtcatcgctgcaaatgtaaaggtaacgacgcggacggtccgcaatgacataaaggaactgcaaaccattgtagaaaaacacggcgcatccattcaatctgtcagagggagcggctataagctgctgatccggaatgagcagccgtttaaaaactggcttcaggacaatttccagcagaacagcaccgtgccgatttttcccgatgaacggatagattaccttatgaaaagaatgcttctggccgacggctacctcaagctggatgacttggcggaagaactgttcatcagtaaatccacacttcaatctgatttaaaagaagtcaaaaaacggctccgcccctatgacatcattttggaaacaaggccgaactacggctttaagctgcgcggcgaagagctccgcctccgttattgtatggcggaatacttagtggacgaccgcgagcctgagcctgatctcctgagtgaaaaggccggtattctgccgaaagacgacattcatgtgatccgcacagccattatgaagcaggttcgaaaccataagatcccgctttctttcttcggcctgaacaatctcatcatccatatcgccattgcctgcaaacgaatccggacagaaaactatgtatctctcattccggaagatcttcatgatattaagcttgaaacagaatatcagtcagcggaagccatcgtaaaagagcttgaatcggcgctttcggtcacctttcccgaacaggaaaccgcctatatcgccattcacctgctcgggacaaagcgcatgacccagtcacaactggaaggaaaagagcttacaaggctgatagacggggaaaccagccgtttgacggaggccatgattgaagccattgagcgggagctgaagctcggaatcacggacgacaatgagctgaaagcgggtcttgcgctccacatcaagccggcgattaaccgaaaccggtacggaatgaacctgagaaacccgatgctctccgccataaaggaaaattatccgctcgcatttgaagcgggagtgattgcgggaatcgtgatcaaggagcaaaccggcattgatattcatgagaatgagatcggatatttggcgcttcatttcggagccgccattgaaaggagaaagacggaacggccgcctaaacgctgcttgattgtctgtgcgtccggcgccggcagcgcacagcttttaagagaaaagctccgttcccggttcgcaaagcgtcttgaaatcgtcggaacggctgattactgcagccttgaccagctttcctttgagtcgattgattttgtggtcagcacagttccgatcaaaaaagacctgcccgttcccgtattaaaggttcatacgctgttgggcggcggggattttacaaaaatcgacgccatgctggaagaaaagcgggaacaattgaactttctgaaaccggagctggtatttttgcagcaggatctggagacgaaggaggacgtcatccgttttctcggacagcaggttgcagaagccggcctcgcttctgattctctgaccgattctatttttgaaagggaaacgatttctcctacgagtttcggcaatcttacggcgattccgcacccgctcgttccgcagacagacacgacgttttgggcggtatgcacgctgaagaagccgattgactgggcggataagcgtgtccaatttgtctgcctgctctgcgtcgagaaagaaagcaaagccgacctccagcatatgtacaaatggctcggcggcatgttagatgatccggccgcggtaagccgtctcttaaaatgcacaacctatcaggaggttttacgagtattcagagacaaacgatcagagaaagaccgggatacaccttttttccgttaacagcggaaaaagcctgagtagttatgaaagcgatttcataatatgatggtactaacatcgagacatacaaaatatcaaactttcaggaggtcttttacatgaatatattactcgtttgtgcagcagggatgtcaacaagcttactcgtcaccaagatggaaaaaagcgcgcaggaacaaggaaaagaatataaaatctgggcggtgtcaggcgattcagtcaaccagcatattgataaagcggacgtattgctgcttgggcctcaagtccgttatttgcttccgcagctgaaaaaattgggtgaatcaaaaggagtgccggttgaagtcatcaataccgtccattacggcacatgcaacggagcggaggttctgaaatcagcggaacagctcggaaacgcatcgtagaaaggggcgggccgtgtgaataaggtgaaccagtttttagaagagaaagtcatgcccattgccggaaaaattgcctcccagcggcatctgcaagcattgcgtgacgggatcatcctcaccatgccgcttattatcatcggttcattttttctgatcatcggcaacctgccgattccgggatatgcggatttcatggcaaagacgttcggaagcgcctggtctcaaaaactgcaatatccggttgatgcgacctttgaaatcatgggtcttgtcgccgctttcggaatcgcctaccgcctggccgaaaaatacggggtggatgcattatcggccggtgcgatatctttggcggcgtttctcttggcaacgccgtacaaagttccgtttctgccttccggcgccaaagaggaaatcatggtcggcggcggcatcccgctgtctctcatgggaagcaaagggctgtttgtcgcgatgatcatcgccatgctgtcgacggaaatttaccgcctgatcatccagcggaatttcgtcttcaaaatgccggacggcgtgcctcctgcggtcagcaaatcgtttatcgctttaattcccggctttgccgtcatctttctgatctggggcgcgcgtttaattgtcgaagcgacaccgtttgaaagccttcataacattgtaagcgttgtactgggtacaccgctctcgattcttgggggaagtctcggcggaagcctgatagccgaagcggttcaaatgctcttgtgggcgtgcggattacacggggcgaacatagtcggcggcgtcatggcgccgatctggttcggagcgatggatgccaaccggattgcgtttcaggcgggcgatgcgcttccgaatattttcacccagcagttttttgaaatctggatcaacatcggcggaagcggcgcgacactggcgctcgtggtcaccatgtttctccgttcgcgaagcaagcagatgaagcagcttgggaaactcgccatcgggccggccgtctttaatattaatgagccgattattttcggaatgccgatcgtcatgaacccgatgcttctcattccgttcattatcacaccgcttgtcacactggtccttacctatatcggcatgagcactggcctcgtcgccaaacctgccggcattgccgtcccatggacgatgccgccgattttctccggctatcttgccacgggcggaaaaatatcaggggctgtcatgcaggcgattaacatcatcacagcctttatcgtgtactatccgttcttcagaatgtgggattcgcaaaagctgaaagaagaaaacgaacttgaacaatcgcaggcgccagccgtacagggagacgaaaaagccgtgctgtagagaaagggagtgaaacacatgaatgaaaaaatggaacagaccatttttcagatcatcctgcatggcggcaacggcagaagcgcatcaatggaagccattgccgccgcaaagcggggggacagagccatggcggaagaaaagcttcaggaagccgcaagggaactgacggaagcccatcattatcagacagaactgatccaaaatgaagccggcggagaaaaaacagacatgacgcttttaatggtgcatgcgcaagatcatttaatgaatgccatgaccgtgaaagacttggccgctgagttagttgagatttacgaaaaagtgagtctgcaagggggagcgaaaatatgacaaaaggaattaaaattgtaacgatcggcggaggctcaagctatacaccggagcttgtggaaggcatcattaaacgctatgaggaactgcctgtcagagaattatggctcgtcgacattcccgaaggcgagaaaaaactcaatatcgtcggcacgcttgcaaaacgcatggtcgaaaaagcgggtgttccgatagagattcacctgacgcttgaccggagagaagccttgaaggatgcggatttcgtaacgactcaattccgcgtcggccttcttgaggcccgcgccaaagatgaacggattccgttaaaatacggcgtaatcggccaggagacaaacggtccgggcggtttattcaaagggctgcgcaccatcccggttattctggaaatcgcgaaagacatcgaagagctttgtccgaatgcatggctcgtgaatttcacaaaccctgccggcatggttaccgaggccttgctccgctactcgaatctcacaaaagtcgtcggcctctgcaatgtgccgatcggcattaaaatgggcgtcgcaaaagcattggacgtggatgtcagccggatcgaagtgcaatttgccgggctgaatcacatggtcttcggattagatgttttcttagacggcgtcagcgtgaaagatcaagtcattgaagccatgggagacccgaaaaacgccatgacgatgaaaaatatctcaggcgcggaatgggagcctgaattcctgaaggcgctcgatctgattccttgcggctaccaccgctattatttcaaaacgaaagaaatgctcgagcatgaaatagaagcgtcacagacggagggcacacgcgccgaggtcgtacagaaggttgagaaagaactgttcgaactgtacaaagatccgaatctcgccatcaaaccgccgcagcttgaaaaacggggcggagcgtactacagtgacgcggcctgcaacctgatcagctccatctataacgacaaacatgatatccagcccgtcaatacgataaacaacggcgcgatcgccagcattccgaatgactcagcggtcgaagtgaactgtgttatgacgaaagacggtccgaaaccgatcgccgtcggtgatctgccggtgtctgtccgcggactcgtccagcaaatcaaatcatttgagcgtgtcgccgctgaagcagccgtcacgggagattatcaaacggcgctacttgcgatgacgatcaaccctctcgtcccgtcagactccgtggcaaaggccattctggatgaaatgcttgaggcccacaaagaacatctgcctcatttctttaagtcgattgaagcataagagcagtaaaaaaacccggattcgcttccgggttttttgcttattttgtttcgcttagtgaggcgacttccgtcgtccagccgaacacgtcggcttccgcgcctttttgaatgcctgtaatggtatcatacaatttcttcgagatctctccggtttcaccgctgccgatgacaagactttcatcattccagatcagttcgccgaccggagaaatgaccgccgccgtaccggttccgaatgtttcttccaatcggccgtcacgatgcgcctggatgatttcatcgatcgaaatcttccgctcagacacagtcagtccccaatgtttgagaagggtgatgacggaatttctcgtaattccttcaagaatgcttccgttcagctccggcgtcacgatttcgccgctgattttgaagaagatgttcatgctgccgacttcttcgatgtattttttctcaatgccgtcaagccataaaacctgggaaaatcccttctcttccgcaacctgctgcgccttcaggcttgatgcatagttgccggcggttttcgcgtttccggtgccgcctttgacggcgcgcacgaattcgttttccacggcgatttttaccggtttaatgccttctttgtaataagagccgaccggggaaagaatgataaacagcttgtacgtatgggatgccgctacaccgaggaaaggctcagtcgcaatgataaacggacggatataaagggaagtgccttccgctttcggaatccagtctttgtcgatggctacgagctgtttcaggccttcaagaacaagctcttcatcaatgagcgggatgcaaaggcggtcatttgactggttcaggcgctccatatttttctccggtctgaacagaagcacttcctgatccttcgttacatacgctttaagcccttcaaaaacggtttggccgtaatgataaaccatggccgcaggatccattgagatggactgataagggataattctcggatcataccagccttgatcggcgtcgtaatccataacaaacatatggtcggtgaaaattctgccgaacgcaaggtcatgggggtccggtttcggttttttggctgaagtcaattcaacacgaatgtcttgtttcatattgttctgtctccctattggtgttattgtcaaacttatttgaaaataatttatattctattgtataccttcaacaaatattcgcaatagttttcctcaaatttgtgaaaaaatcaaatcacataaaaagcaggggagagaatgccccctgcgtgttcgtttttacgtattctgtcatcaccgtgctcagtgaaccgtcaccttgccggttttgtaaaactgctccattgctttatcgacgtacacccagcccttccaggcgatatggatggtgtctttcataaagtacggatcatattcgtgcccggataagtcggcaacctgaaagcccttcgctttaatttgcttagtgacttttttgtagtaatcagtccggccttttttcgggaagccggtgtagtcataccattttccgttgaccggaataaccacgaacatcggttcagcgccggcatctttcagaatgtccagcatatcctcaaagtcgtgatattcgactgatttggcgtatgttcttcctttgttgattcctttcactctctttactttcttcttaatctttttataagaagcgtcatcgatatagaaaggattggacttggagctccgttctcctaattgagcggcggctgtttttaactctgaccacgatttccctttcaggttttcagagatcgtccgttcagggcccttggtttctcccattgaataataaagatcttttttctcaagcagagaataataagctttggcagccggcatgaccgctttcactttccatgattgtccgttgaccattcccttgtacaattcagaaaggacggcatcatgctgaacgactttaaaacggagcatgcgcttcatcatgttctttttgaccgcgggatcaatctggttattaaatgctaaatccaatgcctgaagtgatgaaaaattcggcgcaaagtgctgttcatcagaaccttttttgataaaccattgcggagaaacaatgaataccagttttttgcccttcagctgctgataatgcgccgcaaagttcacggcgtgtatcaaggattggtccccgccttttccgactagataaggcgtaaagccttggttgttcacttggaaatagttggacgggtgaaactcatccagtcttgaaagctcggaagaaccgaaaatcggcagatacttcgagtcttcgaacattttgttttgaagatagagcccctggaacatattcggatttaaggctgccgccgactcttcgacacgtttttcaggaatgaagcgcgtaagccatgaagccggaactgcgatagctccgacaaacaggacgaacgctaaaataattggtccaaagaaacgctttttcatttacttcaactcagtcagtttgtttacaatgttgtttggcgtattccactcgtcacggtcaaattcagtgatcggcactgtaatgccgaagcggttttcgatggcgacaagcagctctacagttccgaaagaatcaagcagtccttcttcaaagatttcaatatcaggattttcttttacagcgtcctcctgacaaacttcagctaatacgtctaatacttcctgtttaaattccatgtgttttcaatctcctttagtgatgaaatggttttcctgagaaaatataaaatccgaaacatacgaaatggaatgtgatgacgatggctaaaaaggccgtaaaacgattggcgggcagccacttgtatttcttattccatttctcaaaaaagttatacccggtcattaatacggcgtggtacaggccgtatacaatatattgcagagcgagtccgtgccagacgcccatcagcatgaacagcaggaaatacccgatgttcgagacggccatccggttctttatccattttttctttgtcatccagaaaacaaagcgcataaatacgtagtctctgaaccagaaggataaggacatgtgccagcggttccagaagtctttaatgtttttgctgataaacggcttattaaagttttccggagatttgatacccatgatatagcttacaccgacggcaaacatcgtgtaacccgcaaaatcaaaaaacaggtacaagctgtatccgtacatgtacagcacattaccccacagtttgctgtgggtgatatgagacagattcataatgaaatacgtgttaatcgcatatccgataatgaatttgtataagaaaccgataaaaattttatgaatgccggtatacagtaaatcagcgtattctccctttgtccatactttctgttcgtccttggcaaatctgcggtatctgtcgatcggaccggaagaaatggtcgggaaaaacataataaagtacaaaaggcggtgaagcggcattttttctttaatcagtccgtctctcgtttccatgatcagctggacgcctttaaatgtcaaataagaaattcctaagaaactgatcaggttatgaaccgggtgatgaggcgccggcggaaagaaaaacggccataatttagataaaaacaggggtaaaatggacgcgatcacggccatactgaagacaaagccgctgttggctttcagtctgtaagcgagataacccctgattaaaagcacctgccacagcgtaaagatacatagtgcgatcacgccgtgcagatcatgcgcgaaaatcaaagccaatacgatgatggatataaacatgttgtatccttggaatctcttgccgttcagccctaaaataatcgtcggcaaaagaaggattccaagtaagataaagaagaaaaacgagctgtaaggcgtcatacaagaacctcttcgccaatgcgtttacggtcgatttttccgttcgcagtcatttgaatgtgatcctgataaatgaattttctcggaatcatgtaggccggaagcgaagcggccagttctttcttaatggcgcttgtcagctggaattctttttcaaaatcatgtttttcaggcacgatggcggcaattagatattcgacaggtccgttaggctgatacgggatgacaaccgccgtgcgcacatattgagactgccttacatgtacttcgatttcctccagctccatgcggtagccgtgaagcttaatctggaaatcaaggcgtccttggcagaaaatctgaccatcctgaacataaccggcatcacccgtgtgatatgcccactggccgtcgatcgggaaaaacgctttttccgtcagagaaggttctccgagatagcctttgcttacgctcgggcccgcgatgatgatttcccctttttctccgtccggaagcttattcccgttttcatccatgatgaagatatccatatcgggttttgcaaaaccgacgggcagggattcattttcatcgatgatctgctgcgtaatttcaacggaggtgacggcaaccgttgtttcagtcgggccgtatgtattgaatacgcgggccttcggaaaacggtttaacagctcctgtgccacggcagccggaagcgcttctccgcaaaacataaatacttctgcctcaggcaggagctcctgcgtaaagccggggtccatcagacacatttggacgaaagacggcgtcgatgtccagacgttcagtttggatttctccagctcttcaaatagtactttcggtttattgattttgtctttcgttacgcaatgcagcgtacctcccgtttgaagcgacgggaaaatgtccatgacagataaatcaaaagaaaacggagcttggtttaagaatgtcttacccccgcccacaggaaaatccctgcagatccagtcagtaaagctttgcaggttatcagccgatatctgcacgcccttcggatttcccgtgctgccggacgtgtaaataatgtaaaacgtgtccagctcttttacccaattctcacggctgaggtctgcatctccgtcagctgcaagctcttcgggcgtaacggttttaatcagattgcttcccgtatcgactgcatcgcccgatacgctgataagcagctctgcgcctgagctttcaatgattttgacgatccgctccgccggaatggaaacatcgacagggatgtaagggcggcccgctttgacgcttcctaagaaagaaacgatcatattcggctccatatgtccgtaaaccaggacaggcgctttcgaaccgtcagctgtatgtttttgaatgccggacgcaacccgctccgacaaatcccataattccccgtaagtgagggaatgatctaaggaacgaaacgcttcggcctgcggcttggcgtctgcatatgtttttatagcatcaagtagtttcatagttatcctccccgattagaaatcgttgtaaatataagtgccggtattcgctgtatgaaatccatacatccaaaagagcaatactaatatcagaaaataaaagcccgtatgaaacgtccatttgatcaatgtattttcataagcacgttttaatttttgcaacatattcaaaattccttccccgcgtattcaataattacaccagtatatgacgattagattaacaaaaagtttcaaaatatgtctaatatcctaagcttaaaatttccttaaaaatgaatgagaaacaaaaggatggaaaacacgcatgtataaattggcaaatgatcatactaaaaaggcgctgttcaggcgggatttttaacttatcgtaaatataaacgaggtaaaaaaattttggcggctttttcttaagcaggcttgtgccgaaccccaatggagaagggcgaaaagccgtttccggcaggatagccgataaagcgccgcatcttgtgaaatgaggaagaaattattatgatagataaggtagcagaaaacgtgaaaaccccaattcaacactactgttatcggctgactgtgaaagccttttaatagaaaggaagaggaaaatgaatcaaaacaatatggggggcagccaaaagacgcccgagaaagaaagcatgggccgcattttgtggcagctaacccgccctcatacattgacggcatcgtttgtgcccgtacttctcggcaccgtattggcgatgttttacgtaaaggttgatttcctgctgtttttggccatgctgttttcctgcctttggatccagatcgccacgaacttattcaatgaatattacgattttaaacgcggtttagatacggaggattccgtcggtatcggcggagcgatcgtccgccacggcatgaagccgaaaacaattctgcagctggcgctcggctcttatgcgattgccctcgtgctcggtgtttatatctgcatgagcagcagctggtggcttgcggctatcggccttgccggcatgctgatcggctatctgtatacgggcggcccgctgccgattgcgtatacaccgttcggggaactgttctccggcatttgcatgggctctgtatttgtccttatttctttcttcattcagacaggcagaattaatgaacaaagcattttgatttccatcccgatcgccatcttggtcggagccattaatctgtccaacaatatccgtgatattgaggaagataaaaagggcggacgtaaaaccctggccattttgatggggcatagaggggccgttatgatactggccgcatcttttgccatcgcttacatctggatcatcggtcttgtcatcatgggttacacaagcccgtggctgttcctggtcttcctgagcgtgccgaaacccgttcaggccgtgaaaggctttgtgaaaaacgaaatgccgatgaacatgattattgcgatgaaatcaacggcgcaaaccaatacattcttcggattcctgctttccatcggactcctgatcagttatttccgctgatcaaatgaaagggcaaatgccataaccggcatttgcttttttttatgacataatcttcacgatattgtaaagaacctgaccgcggactgacacgtctcatatatggacagcaaagcaaggagatgaaaaaaatggacttgtcaacagcccatatggatgatttgaaaacggtcatggaagattggaaaaatgaattattagtttataaattcgctttagatgagctggatacgaagttttctatcatcagccaggaatataatctgattcacgggcataacccgatcgagcatacaaaatcacgcgtgaaaagttttgagagtatcgtcaataaactgatgcgcaaaggctgcgatgtgacgacgcaggaaatgaaagagcatattcatgatattgcgggtgtcaggattatctgttcctttatttccgatatttataatgtcgctgaggttttgaagcagcataaggacctgaagatcgtaaaggtgaaggattatatcaaacatccgaagccgaacggctaccgcagcctgcatttgattattgaaattcccgtttatttgacgaatcgtgtggaatatgtgaaggcggaaattcaaatccgcaccatcgccatggatttttgggcgagtcttgaacataaaatttattacaaattaaataacgaagtcccaaagcatctgaccgacgagctgaaggaagcggcggacatcgcccattatttagacgaaaagatgcttgggattaagaaagaagtcgattaaacgattgacccatcacaaccagccggaccgcttttatgtgcagtccggctggttgtttttatgtttacgtgttttcgctttcccgcgcgatttattctgacgatgattcaggctgaaattctgattgaatttgaacagagaatgcaaaagatatcaaatcgcaaacagcacattcccgcagaaaaaatgtgtaagatcgaggtttactttttttaaaaagggaaagacatttgtacaacaaaaagggagatgaatatcagtgggaaagaatgaaacaatgcatatcgtatcatgtgccgatgatcattatgctcgtcatttgggtgggatgttcgcttctttattgatgaatatggataaaacaagggatgcgaaattatatgtaatcgacggcggaattactgccgaaaacaaggacaagcttgaacagaccgcgatgtcattcgggacgccgcttgaatttttagaagtagacgctgatcaatacaagcatgcagtcgaaagcagccacattacaaaagcggcttattaccgcatttccatccctgatttaattaaggatgagtccgtaaagcggatgatttacattgattgcgatgcaattgtgatggaagatatttcggttttatgggacttggatatttccccggcaatagttgcggcggtagaagacgccggacagcatgaaaggctgaaaaaaatgaatatcagcgacactgccaagtattttaattccggtattatgattatagatttcgaaccttggagaaaacaaaatatttccgaaaaggtgattgattttattaacgaaaacagctcggaggattttctcgtgtttcatgatcaggacgcgcttaacgcgatcttatatgatcaatggcatgaactgcatccgcgctggaatgcgcagacgcatattatcatgaacgagaaaacgcctcctgaactgatcgaccgtatacgttatagagaaacacgtgccgaaccggccatcgtccatttctgcggcagcgacaagccttggaatacaggcacctcgcacccgtatcgtgatcattatttccgatatatgtcctttacgaaatggaacacgatcgaccgcccggccatgaaccaataggcaggtgtgatgaaacgcttgtgaagccgttatccggctcataagcgttttttgctatttcacccgaatcgcacgcacgcgtttttgcaggctggtcttttcggcagacggcttcaatcggctgactgccgtttgcgccgctgattttgcttttttcgtctttgttttttcagccgtttttactttgtctctagcctgctgccggttgagtttatcttttatccggtcaagccgtttttccagagcggttttttcttttcccggctggatttcgctgactgctttttgggcttttgcggtgctggcctcagaggtctttttttccgcctgcttgacgctggcctcagctgttttcaaaaggcttgagttgacagcgttcagccgcttttgcagcccttttttctctgaaccggccggtaatttgcgaatggcgctttgtgcggcattgacggcggtttttttcttttgtttttcggcagtccggactttgtctcttgcgtccgtcacatttcttgccgtctgaactttattgatccgggactcgagagcggtttttccctttgacttggacagcttgctgacggccgtttttgcttgattgatatctgcctgttttttcgtcttttccgcttttattacggtccgttcggcatagctcttttgctttacatgatattgcaccaggccgtacccgaatcggctgtcacgtccgggagcgcccagatctttgacgttttgctgcatctgctgccggagctgtgtatttgtttcctcgggatatttctgcctgagcagcgcgaacatgccggtgacgtggggcgcggcttgagatgtgccgtcagccgtggcgtacatttgattcagatacgtgctcgtaatattggtgccgggtgcggcaaactcaatttgttttccggtcgtggaaaaagccgcgagcccgtttttttcagttgacgctgagactgccgttacgctgctgtaggcgcccggataattgacgggttttttgttgccgtcgtttcctgcggcggctacgatcacgattccttttttgtatgctttgtctacggcgtcgtgaagaattttgctgtctgcgttagttccgaggctcatattgatgatgtccattttattggcgatcgaccagtcgatcgctttaagaaggcttttaagatcccctgcaccctttctgtctaatgccttaactgcatataaccggacatccggcgcgatgccgtcaatgccgtatccgtcatgtttggccgcaatgattccggcgacatgcgtcccgtgtccgttgtcatctttgtatgaggaagtatagctgactgcggaatagcctccggcaatggaaaggtcatcatgagggtaaatgccgctgtcaatgacagccactttcaccttttttcccgtcaagccttctttccacgcctgcttgacctgagtcggttctatatcccattgcggcagcgcgtaactgctgctttgggccgctgataacgggcggatatcagaaccgcctgctgcctgaaaggatacattgtcttctacatataagatgtcagggtcctgtttcaggtctttcaccgtttgtgaatcggctgacacggcgactgccgggagatgctgataggtctgttccacatccgctccgctgtctatggcggattccttgccgttttgatttttgtacaccacgataacgtcccggtcgtgcgtctcggcgtgcgcgggcgccgcggcggagaacaggccggcgcacaaggccgcggccattatcggtttcagggtgtgatacattgcaattccccctttttctttatatatcggcagtgcggaattctttttttcctgagggataaggaaaatttctgtatgcaaatgtaagcgtttccaaaatatgatggagaaaatgctttaagacatctgcgcaatgaactcaaaaagggggtttttgataaatgagtacgttcaatcgggtcatggaagaaaaaatcatgcctgtcgccggaaaagtcgccggccaaaggcacttaagagctttgcgggacggcattattttgactatgccgcttatcatcatcggatcggtttttctgattctgacgagtcttccgattcccggttatgccgattttatggctggtcttttcggtgaaaattgggttgaaaagctcgggtatcccgtgaatgcgtcctttgacattatggcgcttgtcgccgcctttgggattgcctaccggcttgcggaaagctatgaggtggatgccctgtcgtcgggagccattgcccttgccgcctttttattggcgacgccgtatcagattccgtttattcctgacggctcggcaacagagattatggtgggaggcggcattccgatttcgctgctcggaagcaaaggtctgtttgtcgcgatgatcattgcaatgctgtctacggaagtgtaccggtttatcatacaaagaaatatcgtcattaaaatgcctgacggagtgccgcctgcggtcagcaaatcgttcgttgcgctcatccccggtttcattattattacgcttgtatggctggcccgtctgtttattgaaataactccttttaaaagcctccacaatgtcgtaggcgatctgctgggcaccccgctgtctattttgggcgggagtctcggcggaagtcttatcgccgaattcgtgcaaatgctgctttggtcgtgcggcatacacggcgcgtccattatcggcggcgtcatgtcgccgatctggtacggggcgatggatgccaaccgtttggcttttcaggcgggagaagcgctgccgagcatttttacgacacagttctttcaaatatggattaatgtcggcggaagcggagcgacgcttgcccttgtgctgaccatgcttgtgcgctccagaagcaaacagatgaaacagctcggccgtctcggaatcgggcccgcgatttttaacattaacgaaccgattattttcgggatgccgctcgtcatgaatccgctgttaatcgtgccttttatcattgcgccgctcttgaccattacggcgacgtacatcgggatgagcacggggatggtggcaaaaccggcgggaatcgccgtgccgtggacgatgccgccgctgatttccggttatttggcgacgggcgggaaaatctccggttcggtcatgcagctgatcaatctcctgattacatttatcatctattatccgtttttccgaatttgggatcttcaaaaatggagagaggaacgggcggcggaacaaaacgtcactgaagaaacataaaaaaaacgggctctttcgcccgttttttttaacgctggaaaaattcgatccattcgccgtcaggtccttcaatgtaaaagtagcggtacccgttcggaagcgtcgtgatttcttcatcgataaatacggcgccctgacgcttcgcatgcgtgaactccgccgcgatatcttcagttaataaagcgacatgatggacttttccttctgcgggaagctcgctgctgtagccctggatcagttcaatttctgtctccggcccttcttgaaagccgagaaaggcaagttcaataatgccgttcgtatgagtgatacgatcctttaactgcataccgagaacatcttgataaaaggcgatggatgtttcaatatctttgaccataatgcctgtatggtcgattcttttggctgtcatggttttccccctgttttgaatttttcgggacaatgcggtgttgatcatgttttatggtacgataagagaaagcaaaacgaaagaggaatgcacaatgaagctacttacagtgaaagatacatttgccggaaagctgaaaaaaggattccccctgattgaaaaagacgctctgtccggaagctcggctcatctaacagagggcgatctttttgatgtgacatccgagaagggtgagtttatcggaaaaggctattacggtttgcagaataaaggagtcggctgggtgctgtcccgcgcgagagatgaacggatcgacggacgtttctttctggacaagctgaaaaaagcggctgaagcgagagctcatctgtttaaggcgcccgacacgacggcgttccggcttttcaacggtgagggcgacggcatcggcggcgtcacgattgacttttatgacggttatctgctgattcaatggtacagtaaaggcatttacgcttataaggacagcatgattgaggcgattgacggactggagctttcttataaagcgatctatgaaaagaaacgattcgatactgccggacaatacgtggaagacgacgattttgtcaaaggcgaaagaggagattttccggtcattgttcaagaaaacggcatccgatacgcggtggatttaaacgacggggcgatgacgggcattttcttagaccagcgtcatgtgcgcaaagcgattcgggacaagtatgcaaacggcagacgggtgctgaatacgttctcttatacgggggcattttccgttgcggcggcgcttggcggagctgataaaacgaccagcgtcgatgtcgccaaccgcagtctcgcaaaaacgattgaacagttcagcgccaacggaattgattatgaggcgcatgacattaaagtcatggatgttttcaaatacttcggctatgcggcaaaaaaagggctggagtttgacctcatcatccttgatccgccttctttcgcccgcacaaaaaaacggacgttcagcgcggcgaaagattataaaaatctgctgaaggaaacgatcgccatcaccgcaaaaaacggcatcatcgtcgcttcgacaaacagcagcgccttcaatatgaagaaatttaaaggctttatagagaccgcctttaaagaaacaaatgagcgttacgacattttggaagaatacacgcttccggaagatttcaaaacgattcccgcgtttaaagaagggaactatttgaaggttgttttcttgcggaaaaaatagaatgaccatttatagcgtggaaagaggggaaaagaaaaccctctttcatcgcgttaatacgggataaaataatcttcatatcttaaagaaacaacccgctattacttagtatctcatctgtgctaagtaaagtggcctcactaatccccacattgttggctttcatgaaggattgcaccgcttggtagccaaccgcataacctgcaaacggtgataagccgacaggctgataaccttgttcggctgcaaaggtgtcgccaaacatgtaactgctgacctcagcaaatcctttcatatttaatgagtctttgatgatttcttttgagtattctaagtcttctttttcaaaagaagtaacccagggacctaacagagcttctccgtaaagttctttagcaaacgattctgccaacccctctataattaagtaatcaccaaccgttacgttcccataatcccaattgaaatacgaaaaatgaatattatgatgaaattcatgtgcgattacagcaggcagtctcggtatgttatatgaattggggaatattgaaacttgaataaatcccggaattcctccgaatccacaataccctctatgtaactcaagctttttttgattggccagatacatcccaaaccttatttcatcagcatttatttttaagcggttttgtttgataaattctacacaatgagttaaagtgccatatgcaatttgaagagcttgaatttcttttagattctctaatgcttttcttccggtgtccgtatcaaatatgctcagatagcccagcatatttgtagccatgattacatcatatccgttaggttgctttgcctttaagggaacattaatctttttccacatatcttcaaaaggtttcatcattgaataccgataataatcttctctattttcaatcattgaaaataacgtttcgtattgcccaattgtatcctcgataatgattttaatgggtaccaccctttttttgatgatctatataaattgtaatggcatcactcatgagcttcgccaacccttcaccatactgatcgatgttcttagtgaagcgtttatcttcaatatagagttgacctaatccgtaaaaggcatcaaaagaatattcaccaaaattttcattgagaaaatcaaaccactctttgatagctgtttgtacttctggggacttgggagattggttaataaggagtgcaaatttattgaacattgcagtccacttatcagataaatctttttgctcaccatcagtcatgtttttcaatctaatatttaccgtatcgacaggttgatcaccccaccgtttgcgagcttcttgttcataaagattatgattgaagttcattccctcaaaccgctctttgttcgtcatgcaaatttctcccatcatatgtttgattgatttatcgatggtttcaatcattttatcaactctattccgtttctcaatcaacattttcttttgtaaaattaatgcctcccttcggttaaatgaaggactattaatgatttctttaatctcttttaaggagaaatcgagctccttgaaaaatagtatctgctgcagctgttcaagattctcttcagaataaagccgataaccggaatctgtcgtttcctgaggagtcaataatctaatttgatcgtaatgatggagagtacgtatgcttactccaatcagttcagctacttcttttactttcatacccatcacgtttgccgcctccttaatggctactctaaagtattacgcaacgtaagagtcaatagttagttaaagattttttgtatataaagggagaacatatgaggatttcattgctgaaattaaagaaaaaaagccgggcgtgaagctccggcttttttctattcaataatgtgctgcacccggccgattcgtccgtcttcaaggcggaccttaatgccgcgcgggtggaagcttgagttcgtcaaaatatccttcacgattcctcttgtcagctttcctgaacgctgatcggctttcaggacgatatcgacttcaagtccttttctgatgctgcttcgctgctggccgttcatatgacacatccgttcttcagtcttttcacttcatatcttatcatatcgtgttttccccattttatgaaggacagacgaatcaatccttcatagcaaataaaaaaagaccgctctgtaaggagcagtcttttatgacataaacgaaagcaaaatcggggccgcgcacagcgtcataattgcggcgagaatcatggacacgcttgagatcgttcctgatacggagctgagctcaaatgctttagatgttcccgctccgtgcgcgctagttccgagcagcacgccccgggcaatttcgttatcaatgcggaaatagcggatgaccatcggcccgatgatcgttcccaataaagccgttaaaatgacgaaaaccgctgtaacggccggcatcccgccgatcatttctgagacgttcatggcaatcggcgtcgtcacggatcgcggcacgagactgtcgactaagctgctgccgagatggaaccatttcgcgataaaggccgttgacagaatggcgatacatgaaccgaccgctacgttcaaaataatttccacggcgtatttctttaaaatcgggaaatatttataaagcgggatagcgaacgccactgttgccggctgaagcatatcggtcagcagtccgccgccgagattgtatgtctgatacgggacattgacaagaagcagcagtacgaccaaaacagcgggcgtaatcagaagcggcgacgtatacacccgcggaaaacgaatgtagagttttttcgcgcccaaatatactaagacagttaagaataaacttatgattccgatgaacacgtttgttttttctcctttctttttgctatcagctgtgtaagcgtacctgttgaaaccatcacgacaaatgtgctgatgacgacgacaagtaaaatgcttacgccgaatttagacataatatctccgtattcaatcactccgacggcagacgggatgaaaaacagcagcagctcaccgaggagccatgctgcgccaagctcaatccattcaagtttgataatcttgaaatgcaataatgtgaaaagaatcacaatcccgattatactgccgggaatatttatatgaagagccgccgtgacccaattgatcagacgcgcaaatataaacagcagagcgatttgaataacggtaagcagcaattttttcataatgatgcctcccttatatttatattgtacagaaggttttgctataggtaaaatacatataaagaataatgtgtattccttttgtctatagaaaggatgaaatgtaatggatatccggcacttaacgtattttttggaagtggcccgtttgaaaagctttacgaaggcttcacagtctctgtatgtttcacagccgacaatctcaaaaatgattaaaaacatggagacggagctcggcattaagctgttttaccgcaatggccggcaagttgaactgactgacgccgggcagagcatgtatgtgcaggcgcaggaaatcacaaagtccttccaaaacctgacgtcagagctgaacgatattatggaagtgaagaaagggcacgtccgcatcggtcttccgccgatgatcgggtccggctttttcccgagagtgctcggtgacttccgcgtcacatatcccgatgtgacgtttcagcttgttgaggacggctctattaaagtgcagcaaggggtggaggacggctcgcttgatatcggggtcgtcgtacttcccgcgaatgaagagatttttcatacgttcacaatcgtcaaggaaacccttatgctcgtcgtccatccgtcacatcggctcgctgacgagaaagaatgcagtctccacgaattgaaagaagagccgttcatatttttcagggaggattttgtccttcataatcgaattatgacggaatgcgtgaaagccggattcaggcctcacgtcatttatgaaacgtcacagtgggactttatcagcgaaatggtatcggccaacctcggtatcggcctgctgccggaaagaatctgccgcggtcttgatcctgacaaagtcagaaccattccgctcgttcatccggtcattccgtggcatttagccatcatttggcggaaagaccgctatatgtcctttgccgccagagcctggctggagcatacgaaatcgtatttatggaatccgaaaaagagaaaaaaggatgattaagcatggacgcacaaaccgcagctcaacacttgagtaaagtgcgggatcaaaacccgctcgttcacagtatcaccaataatgtcgtcacgaacttcaccgctaacggactgctcgcgctcggcgcatcgcccgttatggcttatgcaattgaggaggccgccgacatggcgaaaatcgcaggagcgctcgtcctgaatataggcaccctcagttcggcgtcggttgaagctatgatcgcagccggaaaatcggccaatgaaaacggcgttccggtcatttttgatccggtaggcgccggcgccacgccgtttcggacggcatcagcccgcaagatcatacaggaggtccgcttgtccgtcattcgcggaaatgccgcggaaatcgccaatattgccggcgcccctgattggaagataaaaggtgtggatgcgggggaagccggaggagatgtggttcagctcgctaagacggctgcaagcgggctgaagacggtcattgcgattaccggaaaaaccgacgtcatctccgacggcaccgacacatacgccgtacataacggtgataaactgctgacgaaggtgacgggggcgggatgcttgctgacgtctgtaatcggagccttctgcgcagcggggcaggacgttctgcaagcggccgtttcagccgtttctgtatacggaagcgccgctcagcttgccgctctggacacctcccataaggggccgggcagcttccagattgagcttttaaacaagctggcaagcatctcagaacaagaagcggccgagcttgccgcaattgaaagggtgacagaaaaatgacgcgtatttctcgggaaatgatgaaggatatgttatcggtttattttattatgggatcaaacaatacaagctcagaccccgtttccgtggtgaaaaaagccattgagggcggcgctacgctttttcaatttcgggaaaaggggagcggttctttaacaggggaggaacgtgtcctgttcgcgaagcaggtacaggatgtctgcaggcaggccgggattcctttcatcattaatgatgatgtcgaattggccttgcgccttgaggcggacggagtgcatatcgggcaggatgacgcagacgccgaagaaacgagagcggcaatcggcgatatgatactcggtgtgtcagcacataacgtctccgaggtgaagcgggcggaagaagccggagccgattacgtcggaatgggcccggtctatccgaccgaaacaaaaaaagatgctgaagccgtgcagggcgttacattgattgaagaggtgcggcgtcagggcatcaccattccgattgtaggaatcggcggcattacggctgacaacgcggcgcccgtcattgaagcgggtgcagacggcgtcagcatgatcagcgccatcagccaagccgaagatccaaaagcggcggcgcggaagttttcagaggaaattcagcgctccaaagcagggctgtcccgataggacggccctttttctgtgtgcgcaaaaaggcagtgacggacttggagaatataagccgtatgtcaagaacagggcaatcagcttgcaatatcgaccgaagtgtttgacggctctatcgcttcgctcaaagtgatgcctgaaccaatcattgccggcgccgaaggcttaaaagccctctatgaaacagtgaaaagcgcgcagtgagagatcatttcgaggtcacggaaaaacttgatgcggaattcagcgaatttgaaggtttgatgtcgaaatacaaaacgtgcgatcaatcgtatatgtcttgtgatacattaagtacagatcaaatcagagagataagcacgaagctgacggccctttctgaaaccatgtcgaagattgccgatgtgctttaaaaggagttaagacgcagcatgagcgatgaacaaaacaaggaaaaacagatccacagacgggatgtcctgaagtggggcgccgtcgcgggcgccgccgttgctgtcggagcgagcggcctcggaggactcgcgccgctcttcaaaccggcggccaccgcttcaaagaagaatgatgaaaaacgtgatcgtgatcaaatcgttcctttttacggaaagcaccaagcgggaatcacaacggcgcatcagacgtatgtgtattttgcggcgcttgatgtcatgtcaagcgacaaagccgatgtcatctcccttttcaaacaatggacaagcctgacgcagctgctgacttcaggcgccgtcccgtcgggcgaacagaaaaataaatatatgcctccgcaggataccggggagtcgcaggatctggcaccggcgaatttgaccgttaccttcggcttcggccccgggtttttcgagaaagacgggaaggaccgcttcggactgaaagataaaaaaccgaagcacctcgccgatattccgccgatgcctaacgacaagcttgataagaaacaaggcggcggtgatatcgtcatacaggtctgcgcggataatgaacaaacggcgtttcacgcggtgcgcaacctgatgaaacaggcatcgggggtgtgcgaagtccgctttctcaataaaggtttcttaagcggcgggaaaaacggagaaacaccgcgcaacctcttcggatttaaagacggcaccggcaaccaaagcacaaaggatgaaaacctgatgaattcgatcgtttgggttcaatcaggagagcctgactggatgacgggcggcacgtacatggcgtttaggaaaattaagatgtttttagatatatgggaccgttcatccttgaaggaacaagaggacacgttcgggcgggtgaaaagctcgggcgcgcctttcggacaaaaaaaggaaaccgatcccgtgaagctgaatcaaattcccgccgactcgcatgtcagcgtggcaaaatcaaccggcagacagattctgcgccgggcattttcctatacggacggaattgatccacagacgggctatgttgacgcaggcctgctgtttatctgctttcaaaaagacccggaccgccaatttgtcccgatgctgaaggctttggcggcaaaggatgcgctgaatgaatacacacaaacgatcggctcttccttattcgcctgtcccggcggctgtaaaaaaggagaatatatcgcccaaaggctgctggaatcgtgacaccttccatatggagggtgtttttaaaaaaaacacttgtaactacatatgttacaacttaaaataaaaaggaaaggagacttacaatgacactgcagattaaagtatattctgattatgtatgtccgttttgctttgtcggcaaagcggcgtttgaagaagcaatcaaggacaaggacgtacaggtggaatggatgccgtttgaattgcgtccgagcccctcgccgaaacttgatccggtgaatgatcccgccaagcggcagatgtggaaaaactccattgagccgatggcgcagtcgttaggcgttgaaatcacgttcccccgcgtgtcaccgcatccttacacggatttggcatttgaaggctttcatttcgcaaaggaacatgggaaaggaagcgaataccatacacgcgtttttcaggcgttctttcaggaagagcaaaatatcggtgacgttggcgtgctgacaaagcttgcggaagaagccggacttgacggcgctaccttcaaagaggcgcttgagacaagagcgtacagacacgtacagcgggaagcgctccgccatgcttatgaggaagccggcattacggcagtgccgacgtttatcatcggcgatgagagaatccctggcgcggcgggaaaggaaacctttgaacaaatcattgagcgggaactgaataaacgttaacccgaaaaaagccctctcgatcagcgagagggctttgccatatagtgtttgacaaatgtttgtctgtccgcttcatatgccgcggcgtcaaatgagtcgccgcaaaaatgaaggcaccaagggtctttctggcaggcgacgccgacttgatagccgtgtttttgaaattcaagcgactgtgatgtgtcgtaaaaatgaaagccgcgaaacaaatcctcccgccactccacgtcatattgagccgccattaacaagccgtcaatggcgtcagcgggcgtaaacaggccgtcttcatcgccgtgctcaaagtccagcgggtgataagcattcccccggtattcaatcacttttcccatccgctctccgctttcccaccaaatgccgttcggcggcagggttttgcagccggcgacaccgagaaggccgagctcctgatgagtttgaaagatatgaagcatgtcatgtaggaaatgctgatgaatgataaaggtatcctgatgcagataaattttatatttggaggggtgtctcagcgctttgttgtaggacgaggccatgcttgctgaatcgtatatcggcatgatatcaacggagtatgaaggggggacggtaagctgcatgatatggcttttgcatcgggagtagagcgactcgtcattcacacagacgacaaacagaaatgaatgtgaatccattacatgctcctctcggcctcaatcacatattgataggccgatgcttctgtcataaagtcatgccttatgccaagctgtacgcatacttcgtgcaatgctgcgatggctttgtggtaagaggggtgatcaacgcggatcgcctcaatgcgtttcacctcatagccggcagctttaaataatgaaagtgtctcttcacgggtaaaaaaacgcaggtgggtctgatccattaatccggcgtcactgtaagtccatttgccggctaaaagctccagcaccactgagatgtggccgacattcggtatgcatgcaagcaccgtgccgtctttttttacataaggacgaagctttttcagcacggaccacgggtcgacaagatgctcaagaacgtctccgaacagcatgcagtcgaattgttctgattcgtacggaagaatggcggattcaatgtcgccgcaaagcacgtggctcaatttgctttccgccttttttgcggcttcgggatacgcttcaatgccgtaaaccgttattccgcggtcttcgatcgccgctcctaaattgcctgtgccgcagccgacatcaagcactgtccgccagttttcgtctattttgttcaataaataaggattcaggccttcgtagtagttctgttgtttttcatcataatagggattcgtatccatctgtgtatcacctcataaatgggcatatacacaagatatgcagcggggggatctcatatcaccatgtttggctgttcaattgcggaatgcggacgggaatggttgtccggtatacggtttgttctctgattcccctcttattgcggctgttcctttgaaaactcgggtgcgggcggactgtggcaggtcatatagtaaaaggatccgcctgtaatcttaccgctggcggatggtgtttttcattggtgtttttttcttcaccgctttttcagtatttaagaagcgcctcacatcgtcaatgtgcaaacccatgattctagcctcttgaattaacaattgccaatcttgatctatatctttcattacatgagttttcataagaacctccaattgaaaaattgatttgcccagctacagcagccaatgtataacaaatatcacacatagttggccggtaatcccaaattgaagatgaattcacctacctattccctaagaaaatgactgaaataaccaaaatccttcaagaattcttacgtataataataaacaaataaatactgactggatagtatgcaaataaaaataaatcatatgacctattaatatttaccctcaaagcgtcgactagcatattctttttgcataaaaaataccgcaaaagaatgattcggtgtaagataaagtgaatgatcaaacagctggggtaaaaaatgaaaaaaaacaaatttcaaattaagagagaagaaacatttgaaagttttattgacgcaggccttcatctcctgattgaaagagcttacgattcagtctcaatcgatgacatcagtaaagcggcgggtttcagcaaaggcgcgttttacgttcattttgaaagcaaggaagattttctgaagcatttattagacaggcgtcagattaaaaaaaggatcatcaccggctatctcgatgaattagaaaagcaaacagcgcggccgttgacgctttgtgaagctgcggcaagcgcggccagtctgttgatgcggtttgtaaacagcaagcctgcctggaatgttgtgtcttttgccgttcatatgcctacttacaaagtcgtcagtgaatatgaagcttatatccgtctttataagttatggatagaagaaagcaccatgtacataaattggctcaaatcgagaaatttaatagaagaccatatagataccgagcataccgctaaaatgatgtgcgcgctcatcgacgggatgattaagcaatccaatgtgctgggaaggccggttactttccgcagcatgtttgacgcgctctatgtttttgtcagcggcagaaaatcagggtaacgttcttcttgatttgacaaaaggtttagaaaagtctttcagaaagcgaggaactgccatgcgctacagagaaattatgatgtatatcattatggggatattcacgaccatcgtgaatatcgtcagtttttactttctgacgtcggcatttgagatggattacaaggcggcgaccgtcgctgcttggattctgtccgttctatttgcatatgtcacgaataaactgtatgtatttcagcaaaagaccgcggggatgcggagtctgatgaaagaattgacggcctttttcagcgtgcgggtattgtctctcgccatcgatctcgccatgatgattcttctggtcagtcaatttcatatgaacgaaacgttggcgaaaatcgccgataacgtcattatcgtagtcgtcaactatgcggccagcaagtggattgtcttcagaaaagcgaaagaagagggcgtgtcataacggtttctttccgcgccccgggggaaagtgtaatggtgaaaggggatgcgtatgaagcacacaataaagaaagcgtttgctgatgtattcggggaatcggaggacctgcgcattttctttgcgcccggcagagtgaatctcatcggagagcatacggattataacgggggccacgtctttccttgcgcgctgacgatcggtacatatgcagccgtccgggagagaggggacaggctcgtcagaatgtactctcatcattttaaagatgcgggcataaaggaatgcagtctcgataatatccgttatcaaaaagaggacgggtgggccaactatccgaaaggggtcatggcggaatgtctcggcagcggtttttcccttccgcacggcctcgatattgtgttctggggaaacatcccgaacggcgccgggctgtcatcttcggcttcgattgaacttgttacggcggtcattctcaaggaatgccatgagcttgaggcggatatgctcgacttggtgaagctcgctcagacggcggaacattcctttatcggcgtcagctgcggaataatggatcaattcgccatcggaatgggaaagaaacatcatgcgattctgctgaattgcggtacgctcagctttgaatatacaaaactcgggctgtcggggctgtcgatcgttattgcaaataccaataaaaaacgaacgcttgcagactcaggctataatacgaggctcaaggagtgcggggaagcgctatgtgatcttcagaagcatctttccgttcaatcactgggagagctgaccccttccgcttttgacgctcatgcggagctgattcagaatgaagtgaacagacgccgggcgaaacacgccgtctatgaaaatcaccgcacaatagaggccgccgacatgttcagtaacaatcagcttcatcatatcggtgaattaatgagggattcgcatctctctttacgcgatgactacgaggtgacgagtcatgagctggatacactggctgaagcggcctggcgccacggcggggtgatcggatcaaggatgacgggagccggtttcggcggctgtacggtcagtatcgtcaaggatgatgcggtttcggattttattgaaacggcaggagcccgctatgaggaaaagacagggagaaaagctgacttttacacggcggatgtcggagccggagcgagagaactaaagggggatgacgatggcaattgagcggcacgtggaacgtttaatccggtacggattgcaaaaagagctgatttcatttcttgatattgaatatacgagaaaccgtttgtatgaagctttgcatatcacccatccggaggtttcagaacagaaagaaaatgtatcggcggcatcattgccggacatattggccccgatttatgaatgggcggcagaaacgggccggattgcagccgatacagacacctatcgcgacctgctgagcgcgaagatcatgggctgctttgccccgcagccgtccgagattgtccgtcgttttgaagaaacaaaggcggtgcacggaccggagcaggcgacaaaggcgttttaccgattttcagaggatgtgtattatatccgttcggacagaataaagcggaatgccgggtggacggctgagacggcttacggaaagctggacatcacgatcaacctttcaaaaccggaaaaagatccgaaagcaattgccgctgccaaagagcagcctcaatccgattatccgagatgtgttctttgtaaagaaaatgtcgggtacgaggggagaccggatcacccggcgcgtcaaaaccttcgtgtcattccggtaattctcggcgatgagcagtggtttctgcaattttctccgtatgtgtattaccgggagcattgcatcgttttgaaagaccggcacgaaccgatgaagatcagcaaaaaaacgtttgaccggctgctgtcgttcgtcagccagtatcctcattattttctcggttccaatgctgatctgccgattgtcggcggcagtattttaagccacgaccattttcaggggggcaattatgaattcccgatggcgcgggcggagacagaaagccggtacaggctgcctgactatccgaaaacggtgttgggaattgtgaagtggccgatgtcggtcatccgcctgcaaagcgagagtgcgtctgagctttccggcgcggcggatgccatcctgcgggcgtggcgcggttattccgatgaggcggctgatctcctcgcccattcaggagaaacaccgcacaatacaattacgccgattgcccggcggagaaacggtttattcgaattagatctcgtcctcagaaataaccgcacctctgatgagcatccgctgggaatttttcatccccatcaggaagttcatcacctgaaaaaagaaaatatcggactgattgaggtaatggggcttgcgattctgccgggccgccttgaacaagaaatgaaatacacggctgaagcgctgtgctcaccggacccggaagcggtcttaacggcagacccttctgcggcagcgcataaagattgggcgctcagtgtgctgcataagcggaaggtaacgaaagaaaacgcggaacagattctgaaagaggaaatcggccatgcctttgcgcggatactggagcatgccggcgtctttaaacaaacagaagaaggcagagcggctttccggcggtttatccgccatttgggcgctctaccggaaaaaagccccatcccataagggacgaggctttttttttatcctctgcttctggcgatcaggctgaataagaacaccacgatcgcagctccgatgattgccggaatgatggcaaagccggcaaggtgagggccccatgtgccgagcagtccgtgcccgatccatgcgccgatcagaccggcgatcattgacccgatgattcccccgggcatactgccttttacaaataaacttccgatccagccgataataatagcgacaatcagagatacgataaaacccataaatatcacttcctattttttattatttatgcctatatgtttccttcgttttgtccatattaaacatatgaatgtgttttttataatgaacatatcaaggcgcgttccggtcttttttttcacaatgcattgcgttaaaatggaaaccgtgtgaaaaggtgtgagcaaaggaaaaaatatttcttttgtagaatgtttaacaaaatgaaactttttgttgaccagcgttttttattatggtaaacctttatttggtattattcgttctcactatcttttttctctatatatgctaaatgatctaaaactttttatgtttgatttgcgcaagtggaaaaagttcatgcattttttgacgattttgtgacattaggtcgaaaaaaagatgaactttagaaaaaaataaagctaataagggcagattttgatagcataacaaggtagatagagaaaagattttgagaaagtacatttcagattcactacatcaataggaaggatggtgatcttcttgttcagagcatttaaaccgttacttttattagcgatgttggctgttgttttcgtactgggcggatgcagcgacatttccgttttagatccgaaaggacctgtagcagaccagcagaaagatctgattctcttgtcaatcggatttatgctgttcattgtcggcgtcgttttcgtactatttacaatcattttagtgaaataccgcgaccgcaaaggcaaagacagcggaaattacaagcccgagatgcacggcaacacgttcttagaagtagtctggacagtgatcccaattttaattgttattgcactttctgtgcctaccgtacagacgatatattcgttagaaaaagcgcctgaagcgacaaaggataaagagcctcttgttgtttatgctacttcggtagactggaaatgggtattcagctaccctgagcaggatattgagacggttaactacctgaacattcctgtagaccgtccggttttatttaaaatttcttcagccgattcaatggcatcgctatggattcctcagcttgggggacaaaaatacgcgatggcgggaatgctgatggatcaatacttacaggctgacaaagtgggaacatatgaaggccgcaacgcgaacttcaccggcgaacactttgccgaccagaaattcaacgtaaaagctgttacgcaaaaagactttaacagctgggtgaaaaaagcccaaagcgattctccaaagctgacgaaagagaagtatgacgaactgatgcttccggagaatgtcggtaaattaacgttctcttctacacacttaaaatacgttgaccacggccaagatgccgaatatgcgatggaggcgcgcaaacgccttggctacaaagccgtatcaccgcactctaaaacagatccgtgggaaaatgtaaagaaaaacgaatttaaagtatccgacgataaacaagattgaaattgaacaagaaaggaggaagcccgaatgaaattgagatgggatgaattttttgtaacaggtgacccattaattctgggcgcacaagtttccattgcgctttccactatcgctatcatcgttgtactcacatacttcaaaaagtggaaatggctctggtctgaatggctgacgtctgtagaccataagaaacttggaatcatgtacattatctctgctgttatcatgctgttccgcggcggggtcgacggcttgatgatgcgcgcccagttagcgcttcctaataacagttttttagactcaaaccactataatgagatctttacgactcacggtacgatcatgattatcttcatggcgatgccgtttttaatcggtctgatcaacgttgtcgtacctttgcagatcggtgcgcgcgacgtagcattcccttacttgaacaacctgagtttctggacgttcttcgtaggtgcgatgcttttcaatatttctttcgttatcggaggttctccgaacgcaggctggacgagttacatgccgctggcaagcaacgacatgagtcccgggcctggtgagaacttctacctgctcggtcttcagattgccggtatcggtacgctgatgacgggtatcaactttatggtgacgatcctgaaaatgcgtacgaaaggcatgacgctgatgcgtatgccgatgtttacatggacgacgctgattacaatggttattatcgtattcgccttccctgttttgacagtggcattggcgctgttatcatttgaccgtttgttcggcgctcactttttcacgctggaagccggcggtatgccgatgctttgggctaacttgttctggatttggggacaccctgaagtatatatcgttatcttaccggcattcggtattttctctgaaattatttcagcgtttgcaagaaagcagttattcggttacaaagcgatggtcggctcaattatcgccatttccgtcctgagtttcctagtatggactcaccacttcttcacaatggggaacagtgcgtctgttaactctttcttctcgattacaacgatggcgatttcggttccgaccggggttaaaatctttaactggctctttacgatgtataaaggccggatcagttttacaacaccgatgctgtgggcgctcgcgttcatcccgaacttcgttgtcggcggggtaacaggggttatgcttgcgatggctgcagcggattatcaataccataatacgtacttcctcgtatctcacttccactatgtgctgatcgcgggtacggtatttgcatgtttcgcaggatttattttctggtatccgaaaatgttcggtcacaagctgaacgaaagaatcggaaaatggttcttctggatctttatgatcggatttaatgtatgtttcttccctcaatacttcttggggctgcaaggtatgcctcgccgtatttacacatacggaccgaatgacggatggactgcattgaactttatttcaactgtcggagccttcatgatgggtgtcggattcttaatcctttgctacaacatctactacagcttccgctactctactcgcgagatcagcggagattcatggggcgtgggacgtacgcttgagtgggcgacttcatctgcgattccgccgcattacaactttgcggtgcttcctgaagtgaaatctcaagatgcgtacctgcaattgaaagaagacaaaacggatattcatccggaaagcaagttcaagaaaatccatatgccgcacaactccggaagaccgcttattatgtcagtggcgttcggtattgcaggcttcggacttgtatttgaatggttctggatgggcattgtcggcttgatcggcattctgctttgcatggtgcttcgttcatttgaatatgacaatggctactatatacctgttgaagaaataaaagagacggaaagaaagatttccgaataaaggaggcgtgatttatggaacatgcagaacacggcaattctaacgcgcctatggaatatcaatctgaaaccggcagactcaatattctcgggttttggatctttttaggggcagagattgtgttgttctcaacactatttgcaaccttcttcgttcttcaaagaagaacagcaggaggagtcttaccggctgaattatttgaagtgaagcttgtcatgatcatgacattcctgcttctgatcagcagtttcacctgcgggatcgctgttcatgaaatgcgtcgcggaagtttaaaaggcgtcgtcatttggacgatcattacgcttcttcttggcgcgggcttcgtcggatgtgagcttaacgagttcatccactatgtacatgaaggagcatctctcggtacaagtgctttctggtctggattcttcgtccttctgggaacgcacggaacgcacgtaacgatcggtatcttctggattgccggcatcttactgcaattgaagaaacgcggattaacgccgcagacgtcttcaaaaatctttatctcaagtttatactggcacttcttagacgttgtttggatcttcatctttacaggcgtctatctcatcggattggggggactataatatggcaaacaaatctgctgaacacagccactttccgtggaagcatatcgtaggttttgcgttgtctattattctgaccctgctggccctttgggttgcagtatatacggaattaagcccatcagcaaaactctggatcattttcggattcgcatttatccaagccggtcttcagcttctcatgttcatgcacatgacagaaagcgaaaacggcggaattcaagtcggaaacacgctcttcggatttttcggagcgattgttatcatccttggttccatctggatctttgcggcgcactaccatcacggtgaccatatggatggaaaccctcctggcggtgcgaagcatcattccgaacatcaggaataaaaagaaaccctcttcgtttatgcgaagagggtttttggtgcctttattggcttcttctccggcgcaggcgcgggaggccgtaaatgataaaggcggcgatatgggcaacgatgacgttgacggcaaacaggatgatcatgagtgtgtggccgagaggggataggctgctggttgcgtaaaagtagaagaaaacccacatgagaataattggcggtatggccgaaagagcgacttttttgttatccagccagataaagaggggtgttgcgctcgcgaccagtaaataagcaaaaaacatgtccatcttacatgtctcctttcattttatgggagcgtttccaaaatgaaatacagagaatgaaatgtgtctgttttgtggtcgttttttgaacattttgttacaattattataccatgttttccaatttttgataccgctttttcgagaaatgtattgcaactattgcctcatttttggataggtacaagaaaccggaaaggccaaataccctgtcacatttccggacaatggaatggcgcaggctgtgaacctttgctatggtcaaagaaaatatgcacagcaagggtggtttgaagtggacgtaaggaaagaagatgtcacagcgccggatgtctttgcgcttttgcaggatcatctgaagagcatgaccatgcattctcctccggaaagtatacatgcgctcaatgcggaccggctgcgtcagcctgacgttacgttttggagtgcgagggaaaacggcatcctgctcggctgcggtgccttaaaggagctaaacagccggcacggtgagatcaaatcaatgaaaacctctccgcatcatgtcagaaaaggcgttgccaaccggatcctccgccatatgcttgaagaagcaaggcggcggggctatcatcggatcagcttggaaaccggttctatggaggcttttctccccgccagacgcctgtatgaaaaagccgggtttcaatattgtgatccgtttgcacattataaagaggacccgaacagcttgtttatgacgttaaacataagctgaaaccccttttctgacgagaaggggttttttatcggaaaagtttcatcatgaccgaaacatttccttttctgacacgtcatatgtcgtgtagtccccaaaccgtaaaaaataaaaaggaagcaacctcatcatgttttcttgaacggtgttcatgtataataaacaatagtgacttccgatgaaaatgtaaggcgggatagaatgagtcgatataagaaacagcaaaatccctattatcagggggatttgatttttatatttggtgtgtttttaataattagtgttgcggcgatttatgcggccggacagttcgggcagtacggaagtgatgcctggatgagacagatcgtcttttatgtcatcggagccggtctcatggtcagtatcatgtattttgatttagagcagcttgaaaaactgagtctgtacgtgttaattgccggcgtgctgtcgctgctccttttacgtgtggcgccggaatccatcgcgccgattaaaaacggagcgaagagctggtttaaaatcggcagctttaccctccagccctctgagtttacgaaaataggaattatgatgatggtcgcgtccattatatcgaaggcgggcccgaaggatcaaaggtcacttagggaagatgtgaatctgcttttgaaaattgcggcatggacggttattccgatcgggatgatcgttttgcaggatgccggaacgggtgcgatctgtctgtttatcgttatggtgatggtgtttatgtcgggtgtaaactggaagctgattaccattatcggcggttcggccgcgcttgtgcttggccttttcttagttctcgtgattgaatttccccatgtggcgaattcaatcggcattgcggattatcaaattaaccggattacatcgtggatgtctgactccagtgcggcaacgactcaggcagagagcgataaaagctggcaggtggatcaggccgttatggcgatcggatcgggcggcattaccggaaacggcgttcataatctgaaggtgtacgtacctgagggacagaccgactttatctttgcgattttgggtgaaagttttggatttttaggctgcgccattgcggttgtcatgtttttctttttaatttacagacttgtggtgctgattgaccgcttgcatgcgtttaaccgatttggcgcgtttttttgcgtaggatttactgcacttatcgtgattcacaccttccagaacatcgggatgaatatcggcattatgccggttaccggtattccgctgctgtttgtcagctatggggggagctcggtgctttctacattaatcagcttcgggatcgtatataacgcaagtgtgcagctgacgaaatataaaagctacctgttcaattcttaatgtgagacggctcgtttttcgggctgtctttttttgtttagagcatttcgcttttgacatgattccctttcggatatgatatagagagaaggaggcttttatatgaacaataccattgaaaccatacttaatcatcggtcgatccgatcatttactgacgagcttctgacagcagaagagatagatacattagtgaaaagcgcccaggcggcgtcaacgtccagttacgtgcaggcttactccatcatcggcgtaaccgataaggagaaaaagcggaagctggcggcactggccggaaaccagccttacgtcgaaaataacgggcacttgtttgtgttttgcgctgatttgtaccgccataaaaaacttgctgaggaaaaaggcgaaaacattaccgagcttcttgagaatacggaaatgtttatggtcagcgtcattgatgccgcacttgccgcacaaaacgtaagtgttgccgcggaatcaatgggacttggcatttgttatatcggaggcattcgaaatgaacttgatcaggtgacggaagtgcttggaacgcctgaccatgtgctgccgctgttcggcttggtagtcggtcatcccgctcatccgtccggtcaaaagccgcgcctgccgaaacaagccgtatatcatgaaaacacgtacgatacgaatgaagaacacttccgcagttatatgaaggaatatgatgaaaccatttccgcttattatgataaacggacaaacggcaagcgggttgaaacgtggtctgatcaaatcctgcagttcatgaaacaaaaaccgagaacctatttaaatcaatatgtaaaagataaaggttttcaaaagaattaagaaaaaacctctcctgacgggactgacccccgtttttgagacagggatcaaaacacctttaagcagccagctgtcggtatgtgaccggcggctggttgtttagtttcgtttgaatacgaatgttgttataatagtgtatataggtttcgacagtttgttctacgatggtcgtcgtagtgctttccaacctgtcgaggtagaacgtttcagactttagtgaggaatgaaacgattcgatggaggcattatcagcgggcgtccctttgcgggacatgctcatggtaatgccttttgttttaacagctttctgatactcgtaagatgtatacacagaaccttggtcactatgtaacacgcagttctcaggcagtgcgggcagctgatcaagtgtgtgtaagacaaagtctgtgtcctgtctatcgccaatcgtaaaagcaatcacttctccattgtataaatccaatatactggaaagatacaattgtttctgcccataaggcaaatatgtgatatccgttactagcttttccagagggcgatcagactgaaagttccgatccaatatattctcggccacggcatatggctgcccattcttcttgcgctttttcaccttaacccggcattgccactgattcttctgcataatgcgctgaaccgttttatgattcatacgcattcccttttttaatatggctgtgattttccgatagccatatcgatacttgtgttctcggcacaacgtgccgatttgtttttccaaatggcgcttgggatgatccttcatcagattcttcttccaacgataataagacgctcgagagatacctaaatgaatacagatatcctgtacggtcattgtgctgtgcaatatttctacaagttcgactgacgtttcgctatcaacttcctttccaattcgttgtacttttttaacacttcattctgttgtctcagataacgattttctgcctgcagtttctctaattcggaagaatactctggaccttttccgtaagtgtattgctttccaacaggctgttcgaatcgatgtgtatcaccagccttataccatctaacccatgtctgaacctgtgtcttattcttaatattcaactcctgcatgatctctttcataggtacgcctgccaatctcatttctacagccttctgtttcgcttcaaccggataactcactcttgtccccatagaaaaaacacctccaagtctaatttcggataacaatcatccgtattcaaacttgaaggtgtttttatttgtctcatcttatggggtcagtcccaccgggagaggtttttttatgtttcacgtgtaacatatttcgacaaaatggaacaaggtatataaatgtttatcatcagggatgcttataagcatacagaaagaaaaaacggcttagcagtggtacgatgttgatgaggtgacagtgatgatttcattaagcatattagatcaatctcctgtatcagaagggagttccgcggaaagcgcgctgcgggatacagtaagactggcgcaggaggcggaaaagcttggatataagaggttttgggtgtcagagcatcatttttcagagcggttggcgggttcaagccctgaagtgctgatcagccatattgcggcgaaaacgaatgagattcgtgtaggctcgggcggtgtcatgcttccgcattacagcgcatataaggtggcggagaatttccgcgtgcttgaagggttgacgccgggcagaatcgatctcggattagggagagcgccgggcggaatgccgatcgcatcatgggcgctgaatgacggcgggaagcgtaatgctgatcaatatccgcagcagcttcgtgagctggcgatgtatttgcatgatacagctgatgacaatcaccgttttccgaatctgaccgcatcaccccttattaagacggcgccggaagtctggcttctcggttcttcgggggaaagcgcgcttctgagcgcagaaatgggagcaggctatatgtttgcccattttattaatggagaaggcggagaaagcacgacagcacaatataagcgcagatttaaaccttccgcattaggaaaagaaccaaaaacggccgtggctgtgtttgtgctgtgcgcggacacggaggagaaagcggaggaactcgcggccgtcatggattatacgctgcttgcgggtgaacaggggattccgcttcacggcgtaccgtcttacgaaaccgtccgcggaaatacgtatacaccgtatgaacaaagacgaattgccgataatcggaatcgaatgatcatcggaacgaagccgcaagtgaaagaacagattctggctctcagtaaagcatacggaacggaagaagtgatggctgtaaccattactcatcattttgaagataaacttcagtcataccggctgcttcgtgaagcttttgccgaatgatcagaaagaaaccctgctgatgctccagcagggttgttcggttattcaatgataaaaggtttttcagtcagcacctggcttgatttccctttgttcgcggcataggccagcatataatattctcctgccggcagtgcgctgtcaccattgactttgccgttccagtcgaaatattgatagcctttatcctgctttttgtagatgccggcttggccgacaaagtcaagattgctgtcatatacaaggaaggcaagctcttcggctcccgccggaagataggtttcaatttggtaggttccctgcgttgtgccgtcctgcacgtcgattgacgtcacgcgcggatagtccggctcttttacaatcagcagcgtcggcacttttgcaactgtttttccgccttctcgcactgtgacggttccctcataggtgcctgcctttacttttttggcattgacctttactttcgcattgacctttccggtttgatgagcggggatcacgacccggtctgtgcccgaaacggtaatgcccctgccgttgaaagagtactcgagctgatatgattttctgatggacgattgattttcaatcgtaaaggtttcttttttcgtttcattgcctttgtctttcataaacgttccgtaagaataacttcccggggcgacaagggagtctgctttgatcgccttcatgattctgatgcttccggcaccttgcgcattatgcgggtatacgtcaccgtccgcgtccgttaaggtttccgccgtgttcatgagagcggcttttatttgttccgggctccatttcggtttggcctgcttgatgacggcagctgcgccggctacatgcggggaagccatgctcgttccctgcttcgatccgtagccgtacgggtcggccggatcatgggtcggaatggtgctgacgacgtttacgccgggggcggagacgtcaggtttaatcatccacgtgtccataaccggaccgcgtgacgaaaagtctgccatttgttcagtgagcgatttagccacggataaattgaaagtcgcttttgtgccgcccgcttttaattggctgacgagtttttcgccgtcttctgatgaaagcttaatcgtcggcacggacatgcccggtacgtttgcttcaatttctcccggggcattgttatacacaaccataccgatcgcgcccgcttttttggcgttgtctgctttatccacaaaggcgatgctgccccgtttgacgacagcgacttttcccttcagatctttgccttcaaaatccttttgctcgccgatacccgcctctatgagctctgtttcttttttattcagtgcttttatgtcatcttctttgttgtagcccattactttcgctgaggaataggaaccgaaggacacggcgtactcgttcagcggcagctgggtcgctccgacggagatggcttctctggacgttcccggagagccgacggtccaattgttcggcccgctgtttccgtttgatgtaacggccgtgacgccttctgacatcgcccagtcaagcgccgtgcttgtcgcccagtctgggttattcacagaattgccgagagaaaggttcatgacatccgctccgtcctgtacggcgcgttcgatgccggcgatgacgttctccgttgttccgcttccgcccggaccgagcacacggtaggcaaggagtgtagcatccggcgcgacgcctttgatcgttccgtttgccgctaccgtgcccgcgacatgggttccgtggtcagtcgacgcgcctctcggatcaccggacgccgtttcttcaggatcgtaatcgttatccacaaaatcgtatcctttatattgtccgaaatttttctttaagtcagggtgtttatattcgacaccggtgtcaataatggcaaccttgacgcctttacccgtatagccgagcttccacgcgtcatttgcccctatataaggcgcgctgtcatccatctgcggagacacggcatccttagatagggtgatgtctttatctttgagctgatcggtatgataggtgacattcggataaaccgctttgacatcctgatcactcagcagtttggggatttcatttgccgggagtttcatggagaagccggaaaacacttgctcatattccctgttaatttttccgtgtttaatggttttgagcgctttctttttcacttttgcgcgttcgcttttcagcctgctttttgtctgtgctttgccgagttcctttgcttccgccagtgacttttccttcagctccacgatgactgtcgtttgtttgccggtggtcatatcaatgtcaccgaacacctcagccttctcaagatcaggagtttgcggttttgaagccggcgcagcctgtgaacttgtggataaggtaaaggataagacaaaagccggaagcagataacggatgattccttttttcaatcgtgtttcccccttttttctttatctaaattagaaatctagtatatatttcttgaaaattcaaaataatccttgtgacatatgactcatttatggaaattggtctgtgaataaggagggagttatacacagaatcctgtgtataactgaataaatttgtgtatatatattgttgggaacgagtgttcctatacaaaatatagatcgagtttgtggatatgtggatatgccctgtgtttaagctgtgcttaaccaagggataaggtgtgtataactttttttatcggcttttccatttttcaggtcatttccatcagctttcaacaaaacttctgaaaactagtttgttttttcactcatattgtgacaaacaattcgcccggccgcgtctatcatagagtcatagggttgctagacccgctagtttttagcggagaaggatcggccgccttttccgttaaagcggagagaaaaacaggcctgcgaacaagctgtctgtcaaaaagaagcggagggatgatttgcaatgaaacgtttgctagtatctttacgggtgtggatggtctttctgatgaactggatggcgccgggtaacggaagatatccattagccgccgtgtacggaaaccaagcggcttatcataagaaagcgaagcggacggctggggctttttcgtttgtgagccgtgtccgatcggcggatttgaccgatgaaacgaaatcggcccgcggcaggctggataaaaaccgatggatgcctgtccgcaaagaattgccgaaacgggagcgcgcgggtccggcacctttacatcatatgaaaaagagggtacaatcccactaaacatatgaacgggagcgaacctcttgagaatagacaaagtattaaataacaatgcggcgttaataaaagaagacggacgggaaaagatcgtaatgggtcccggaatcgcttttcaaaagagaaaaaatgatgtgattcaaaaacataaaattgaaaaaatatttgtcgtgcacgacgaaaatgaaaagttcaaacaagtgttagaaacgcttcccgaagagcatatagaggcggctgaagatatcatcagccatgcggagggagagcttgcggcacctttgagcgatcacatccacattgcgctggcggaccatttatcctttgcgatcgaaaggattcaaaacggccttcaggtgcataaccgattgcttcatgaaattaaggcgctttataaaaaagaatatgagatcggccgctgggcggttgaacacgtgaaacaaaccctcggtatatcattgcctgatgatgaggcggggtatatcgcgcttcatatccacactgccaaggcggatgccaaaagcatgtattcggcgatgaagcatacaaccatgatcaaagaaatgatcgaaaagatcgaatcctttttcgaacagaaggtggatgaagacagtatttcctatcagcgcctcgtcacgcacttacggtatgcggtcagccggttggactcaaatgaagcactccattccatggacgaggagatgctttatttcatccaaaaaaagtatccgtttgcttatcggtgtgcgcttgaactggcggcgtttttaaaaactgaatatgatttggagctgccggaatccgaggccggctatatcacgctgcatgtccagcgtctgcaaaaaaacccggaataacgcgtctgtttcgagaaacagactttttttttgaaaacatattgacgaaagcgctatcatgaaatagaatgaaagcgcattaaaaaaactgaatccggcgggattgtgactggtaatgcaggcaagacctaaaatttgcgtacatgaaaaagggatcatgctgacctttttcgttggcgaattttaggtcttttttgattttagaaagggggatacatcatgaattatcaagaaacggcaaaacagcttatcaaacatatcggaggggaatcaaatgtcatcagcgcgacacattgcgcgacgcggctcaggctcgtcattcaagatgaacagaagatcagccaggccggcattgaagaaatagaaggcgtaaaaggggctttcagcagctcggggcaatatcagattatattcggcaccggcctcgtgaataaagtgtatgacgctttttcaaaagaagccgatttggggcgggaagatcgtgagacacatcaggacgcagcgaaaaaaaagctgaatccggccgcaagatttgcgaagacactgtctaacatattcgttcccatcattccggctatcgtggcaagcggacttttaatggggctgcttggcatgatgaaggcttttcactgggtgtctgaacaatcatcgctgtttaagcttttagacatgttttcaagcgcggcgtttatcttcctgcccgtattcatcgggttcagcgcggcgaaggaatttggcggtaatgcctatctcggtgccgtgctcgggggaattatgatccatccggcgcttttgaatccgtgggggcttgcggatgcatcgcctgattttatgcagctcttcggcttcgacattgcgctgctcggctaccaagggacggtcatccccgtactgttagccgtttacattatgagcaaagtggaaaagggcacgagaaaaattgtgcctcacgcattcgatttattggtcacgccgtttgtcacggtgattgtcacaggatttatcacctttatcgcaatcggtccgcttggcagggcgatcggatcaggcattaccgtctcgctgacatatgtgtatgatcatgcgggcattgttgccggactgcttttcggcggtctttatccgcttattgtgcttaccggtgtgcatcacagctttcatgcgattgaggccggcctcatcgctgatttgggcagaaactatatccttcctatctggtcgatggcgaatgtcgctcagggcgcggcgggactggctgtatttttcctgacgaaaaaagcgaaaatgaaagaaatcgctctgccggccgcattttccgcttttctcggtgtaaccgaaccagtcattttcggtgtgaacctaagataccgcaagccgtttatcgcgggaatgatcggcggagcgctgggcggagcctatgtcgtggtgaccggtgtcgccgccaatgcctacggtctgaccggaattccgatgattgccatcacggctccgctcggtttaggaaatcttataaactatctgatcggaataggcatcgcctctgtctcggcgtttattgccgcttacattatgggagctaaagaaaaggaggccgtcaaatgaggacaccggatcaagagctgcgcctgcaggctgaggaagcgaaaaagaagcggggagaaacagccgcgtcagatccataccgccagaactatcatattatgccgccggtcgggcttttaaatgatccgaacggcgtgatccaatggaacggcgtatatcacttgttttttcaatggcagccatttcatacggggcacggcgcgaaattttgggcgcatgtgacgacgaaggatttcgttgagtggaaagaggaagaaatcgcgcttgcaccgggtgagtggtatgacaaaaacggctgctattccggaagcgccatcgaaaaagacgggcggctctgcctgatgtacacaggcaatgtccgtgacggagaaggcaatcgggaaacgtatcaatgcctcgccgtatccgaagacgggatcgtatttgaaaaaaaaggagttgtcgcgcgtctcccggaaggctataccgctcatttccgtgatccgaaggtttggaagaaagacggagcgtattacatggtgcttggcgcgcagacagaaaaactcaccggaagcgctgtgttgttcacatcagagaacttgacggattggacgtttctcggtgcgattgcgggggcggactccggcggtctcgggtcattcggttatatgtgggaatgtcccgacctgttttcccttgacggaaccgacgtgctgctcgtatgtccgcaggggcttgaagccgacgggatagaatatcataacagccaccaggcgggctatttcctcggcaggctgcatacagagccgccagaatttaagcacggtgaatttacggagcttgacagaggatttgacttttacgcggcgcagacgctggaagatgataagggacggagaattctgttcgcgtggatgggcgttccggatcagcatgaggacaaacatccgacacatgcgtatcactggattcactgcttaacgatgccgagacagctgtcactgtccaacggcagaatcatacagcgcccgctttcggaaatgaaatcacgccgcacggatgaacaaaagcaccgtcttcaattgaattgctcgtctgtaagcctcccggtgaaagatgcgtcccgggctgaagtgctgctggaggacatcacttgcgaatccggttttgaaatctcaattcggggcgcggcccggtttatatttcatcaggaagaggggctggctgtgctggagcgcaccgctttcagcggagaagaaaaagaaaagagaagctgctccatcagcgaggtgcattccgtgcagctctttctggatgcatcctcgattgaattgtttttgaatgatggagaagaggtattcagcgccagatattttcctttcccgggaaatgatgacgtaaccgtcacttcggcaggaaaaacggaaataaatggctcgatttggacacttttgtagaaaatcgttcttttttcttatgtgaaacctatgccatctgtgctattcttcaaacgaaagcctatgattccaggaataaaaggagttgttttctcagttttgaaaaatcagaagatgacgccgaaatgtttacttgtcaaagccgcagagcaagtggaagataagcgggaagaatataaagaagtattgcttcagctgaagcgcatgctcaagagagctgagccgcacaatgaatggagtgatcggctgatgcatacatatgaacagatgaaggaatatgcgctgtttgtgcagtctattgagatgtttttgcggtcatccgcgaaaaaaatgaaataatccccctcgggtaatgagggggatatttattttattttccgctaagacgcatcgccgaatgtttagtcggtccgatgtattggttcagcgggaaggattctttgattgccgcggtgataaattcttttgccgcatagatggcttccttcacttcagcgcctttggccagttctgccgtcacggcggcggagaatgtgcatccggctccgtgcgtgtaaggtgtatcaatcatttcgctttctaatacttccgcggtttctccgtcatacagcacgtcgatcgctttttcatgtttcaatttgcctccgcctgtaatcaatacatatttcgcgccgagttcgtgaattttcttggccgcttctttcatgtcttccaccgtttttaattcatccataccgctcagctggcttgcttcaaacaggtttggcgtgatgacggttgccagagacgccaattgggtgcgaagcgcttcggcatgctccggatacagcacttcgttcgctcctttgcagaccatgacaggatcgataacgacattcttcagctgtttttctttaatcgttttcgccgcaagctctatgatctccacggtagggagcattcccgttttcatggcgtctacgccgattccgtcaacaatcgtcgccagctgtgcgcgaatcgtatcggcatcgatcgggaatacttgatgatcccagctgttctccgggtccatcgctacgatcacggtcaaagccgtcattccgtatacgtttttttcttgaaatgtttttaaatcggcctgaattcccgcgccgccgctggaatcagaaccggcaatagtaagtgctttgtgcattgacatatcaatggcctccatcagtgttttatatctcattatagttagattttcttccgatcacaatacggaaggcttggaggaatgatttgacagccgcgggggatgtgcgtacaatacctacataagattactaggtaagggtgagaaaataaatgctcaacagggagcttgtaaagggaagcacggtcattctggtgctgacgctgctgaatgaacggcccatgtacgggtatgaacttgtgaaagaaatggagaaaagaagcgggaatgaactgcaaatgaaggaaggcacgctgtacccatcgcttcataagcttgaacgccaaagctatatttcttcttactgggaaaagcagaccaaagggccggaccgaaaatattaccggatcaccgatgaaggaaaaaacattctagccgaacggacgaaggaatggaatctgttctctgctctgatggaccggatgctgaagcggggcgggcagaatggataaagacctttatgtgcaggaaatcagaaaagggctggaaggcaaggccggaagccgtgaattattaaaagaaatcgaaagccatattcatcatgccatttgtgatcatctggaaaaaggcaaaaccgaaagcgaagcgatggagcttattctgcgggaagtggggactccgtctgagattatctctgcttttcaaaaagcttcggcggtgcccgcgcggacttttatgctcttttatctgttctgcaactgcggtctttttgtgatgggggcgatgattacgatgatgcacgcgtggaggattcatcccgctgttgacgcgctgtggaaagggatttccgtgtcagtatggctgattatgatcggttatgtgctgtattggttccaaatcggctatcaagctggcaaagagttcggggctggcggcaaaaagcttgctgagcggacggtatgggcttcaattgtgccgaatctatgttttatgtttgtcttcttgttcaatctggttccggctgggctgtttccttcggcggtcacaccgagttttgcggcagtatgcgccgttgtgacggtatgttttccgttttgcggaaaaataggtttttacgcaggcaggcagagacttgcctgatctttttcactatatacatagggaatctatataggggtgttaaaatgagattaggttcgtggatgtacggcgcgtgcgcccaaatagccgtaaccgtatttaccgtctgcagcttggttcttgcattgcccgttgtgagtctttttattatggttctgaatgggatgcaagacgctgtttttgttgttttcagtattttgcttcttctattattttatgcgctgggatggatttgggccgtttcgtttgcgcgtgagtggaaggtgaaacttttcgagctgcagatcagttcgctcattccgctggcgggtatattatacttgtacattgacagcggggtgagtataccggaactgattcatgattggggtgaggatggatgtgcgcttgtcccgccggcttttgtctgcttgtgcacaagctatgcgatggtgttggtgcctgtttatcaatcaaaactttggaacgccatggaggcgggcagacttaatgccaaggcggtatgcactgtttggggagaccttctgatcattctcgttttgctggcgggcatgacctggatttgtttctgaatgggccgaaatcaaaaatcccccctgatctctccgccgctttatgttttaatagaacatgagaaaaagcagaaggagcggatcatgaatatatcaattgtcatagtcacgtataatcggattccggctttgtgtgagctgctggagtcgatttccatgcagaccataaagccttatgaagtgatcattgtaaatgatgccggggaatcggtcgaacaagcgaagcagctgtacagcgatctgccgattcagattattgatttagaacagaatgccggacatgtggaagctcggaacgcaggtgtgaaaaaagcgtcgggtgattgtatcatgctgtgcgatgatgatgatttcattacgccgggccatttggaaagaatggcggctgcacttgctgatgcggattttgtccattctgacgcggaaattgtgtcatttgaagaacggggcggcacgagatacccggtgtcacgaaagccgttcgcctatacggcggattatgcggatatgcgggtattttccacgtacgttccgtcaggcagcatgtacaggcgttctctgcatgacacgttggggtattttgatccggatgtccataattattgggactgggacttttatttgcgcgccgcgaaacagcaccgtgtgaagcgtgttccttgcgcgagcgtcatatatgcgttttttgagggaggcggcaatcagtccgcggatctcggcggcaaaaggaagcggtacttagaccggttaagcgaaaagcacgggcttggagaactcccgacgaaaaactttgcggttcttcttgaagagccggacatgaagaggcgggaggcgccgactgacattgtgtgggacggaaagcccgtccattcaagactgcacagttcataagggggacggacagtttgaaacagcttttaaaagacagctggtggaatcagctgaaagatgaatttgacaaaccgtattatcaagagctgagagaaatgctgaaacaagaatacagcagccaaacgatttatcctgacagccatgatatttttaacgccttgcattatacgccctatgaggatgtaaaagcggtcattctcggacaggatccatatcacgggccaggacaggcgcacgggcttagtttttccgttcagcccggggtcaggcagccgccgtctttgaaaaatattttcatagagcttcaggacgatatcggctgctccgtaccgaaccatggatcgctcgtcagctgggcgaagcagggagtgcttttgttaaacacagtgcttacggttcgccgcggtcaggccaattcccacaaaggcaagggatgggagcggctcactgaccgcatcattgatgtggtgaatgaaagagagaagccgattgtctttatcctatgggggcgtcacgcgcagatgaaaaaagagcgcattgacacatcgaaacacattattattgaatcgactcatccgagcccgttttcggcaaggaacggttttttcgggagcagaccgttttcccgtacaaacgccgcccttgaaaaaatgggggagcagccgatcgactggtgcatccccgacctgccgcaataaacggttttttgaggcgcttccgcccggcggtaagcgccttttttggcgttcagggcggtatgccgtcagaaaaaataacaaactcaattctgcgattcgctcagaaatttgataaaatgcaggaagaagacaaattactgctggaggatttactcatgaacatacatatctctgctttgattcagaagatggaagaagaactgaggcaggcgaaaacggcgacccgcaccgaggaggtcaaaatgcacgcggctgccatccgctctctgtgtgatgtcgtgctcggcactcagacgcacaccgctccggcgccagtgcagaatccgattccgaaagcggcgccgaaaccttccgcgtctccttcgacagacccgctgctgcttgaaaaaatgatgggcagcgccgggctgaaccaatatcagaaaaaagcgaaagacgaacgtgaggaagacggaaacggggattccattttcgatttttaacaggagaggttgattgacttgaaactgatactcgggggtttgcaatggacggcatttatgattgcggctgcgattgtagttcctgtcgccatcgcacaatcatttcacttgaaccatgccgattctgccgcattgattcagagcacattttttgtgcttggcgtcgccgcggtcatccaatgtctccagggacatcgtctgccgattaatgaaagcccggcaggcttatggtggggcgtatacacgatttacggcggactgactggcacggtgttcgcgacattcggcgagacgctgcgggcgctgcagggggcgctgttattaagcgctgtctttttctttttgttcagcctttttaaagtgattgaacggctggccgtgctgtttacgccggttgtgaccggtgtgtatctgctgctgttggtcatgcagctgagtcagccgattgtgaaaggccttttgggcatcggctatttaaaaaacagcgtcgacggccttgtattcgggctcgccatggttgtgacggcggcgatgttcatcatgtcccgatcgaatgttacgttcttaagacagtatgcgattctcctttcgcttgccggcggatggatcttattcgccgtcttcggcgctgccaaaccgattcaaataccggaccgcgtgattcagctgccggctctttttccgtttggaaaacccgtgtttgacagcggcctgatcattacgtcacttttcattaccgtgcttttgattgtcaatatgctcgcgagcatccgggttgtagaagcggcggtgaaaaaattcggcggcaccgtcgggaaacggcgtgagcgtccggctgggtttgcggcttcgatcagccaccttttgagcggactgtcagggggcattgcgcctgtgccgatttcaggggcggccggttttattgagacgacgaagcttccttcgaaaaagccgtttcttttgggaagtgtatttgtcgtgatcatcagtatgatcccgctatttatgaatgcgtttgcgagtctgccctcaccggtcggctttgcggtaaacttcgtcgttttctccacgatggccggtctcgcctttacggagtttgactcttatgagaaagcggagcaaaaacgaatccgctccattatcggtctggcgctcctgacgggggtcggcgtaatgtttgtgccggagagcgcgttatcggggatgcatccgatcctgatttcgctcttaagcaacggtcttgtgctcgggacgctgctggcgatagcgattgaccgaatccagcttatcaaaaagaaaaaatccgacaatctcgtgtcatcggacggcggacgttgaattttgccgatgttgggttatgattgaattggaaactttaacgaaaaggcgggagaaaaatagatgaaagtgtttattattcttggtgcgattaacgctttattggccgtggcgctgggcgctttcggcgcgcatgggcttgaagggaaaatccccgataaatatttacaggtgtggcacacaggcgtgcaatatcatatgtatcacgcgctcggtcttctggctgtcgcgtttttgaccgaaaagctttctggcgcaggcagtgtttctgttgcgggttggctgatgtttgcgggcatcgttctgttttcaggaagcctgtacgtattgagcgtgacgcagatttccattctcggcgcgattacaccgctcggcggcgtggcgtttatcatctcttggattatgattatcgtcgcggccgtcaaatatttataaagaaaaaaagccaatcctctgtcaaatgagcgattggctttttgatttatctcggagaataagaagacatggagtacggataagtataagcgatttcctcatcaaacgtgatgtaatcaaggtaaatggtcagaagcagatagcgggtgcccgttttcggatcgctgatgatgatatggtcacgtcccgccgcctgaatcacaccgcggaaaatctttgaattccattctttgctgttttcaaatgtcatataaatcgtcgctgttttgccccggttcaaccgcagaatattttcaatgtatgactcttcaatcggcagcatgccgggaacgttttgtgacgatgatggacctgacggaatctgaaagctgccgccgccctgctgctgcggctggccggggaaccccccgccgaagctctgctggccttgctgcatcggcattgtcatttgctgctgcatcggcatcatttgtgatccttggccctgaggctgcggataaggattaggcccgagctgcggctggtatccttgcatatccattcccattcccatccccatcccctgcatttgctgatattgattctttttcggtttcatattgttcctcctttgatgaaaacctcttgatgctgaaacctcctgacaagtatcagacagccgacagagcggctgctgtttttatctattccaccatatgagcccaaagaaagatttatgcgaaaaaagaaaatacgctccaatgagtccggacatcagagccggctttttttgtgcgcgcaatgctgacttttcacataatagtctgtattcctagcgcatcttccgcataaggaacatatgatagcggtagtttcaggtgcgaaaagggggtgacgagttgcctaaagtgtcagtgatcatgacgagctataacaaaagtgactatgtggcccgctctattaaaagtattctgtctcaaacgtttacggactttgagctgttcattatggatgacaactcaaatgaagcgacattggcggaaatacgtccttttctcacggatgaccgcgtccggttttatcaaagcgatgtatcgggcgtcaaagaaagaacggaaaaaacacgctacgccgccttgattaatcaggcaatagaaatggcggagggcgagtacgtgacgtatgcgaccgacgacaacacgtatgtgccggaacggcttgagaaaatggtgaaagagcttgatgaagacccggaaaaagccgtcgtgtattcaagttccaaaacctatcatctgaatcagcggaaagagacggtgaaggagacggccaggcccgccgaacggatcgtgtggaacgcgccgtgcgccattgaccattgttcggtcatgcaccggttttccgtgctggaacaggttaaatcggcattcggttcctattgggatgaaagcccggcgttttaccggatcggtgacgcccgtttcttctggagagtgaatcatttttatccgttttacccgatttctgaggagcttgatatcaattatattaccgatcaatccatccattatcagcttttcgcggcggagaaaaacgagtttgtgaacagccttccgcagcagaccacgtgccgggagctgagggaatcattaaaaaagcttggaaaggggtgagggcttgtcggcatacttagcgaactattgggtgctgtaccggcagtatattgacctttttcagtcacttcgctacaaagacatcccgctcgcattgatcagtaatttttatcaatatatcagtccggcgcttcgggagagcatggagcagaacccagagcttttcggtccggctgatcagcatattcctgaagccggtatacagccatattatgatcaaaaaaggcaaaacattaagaaaacagatgagaaaccggtaaacggaaaagtcattctgcatttcgatcatcttcggttcaccgagggaaactaccggcagtttgacccggcaaaaacagcggtactggccagatggagtctgcctgaccattacgggctgcccgttatctgcaaattggagctgacgggaatggggcaaaaagggaaccccgtcccttatattgaaaaagcacattccattttgaaagagcttcacagccatcccgctttcggaaacagagaatttcaggaacgtttgtataaagacattccattatttattgaagcgattgacgccattgatattttgtttacggccgaaaagatttccgccgttgtagtcggcacgacggaggatatttacagccgtgtgctggcgctgatgtccgcgaaaaaaaacgccgtcagcatctgtcttcagcacggagcgctcatgggagatgaagcgtttctgcccgtgtttacggactatcaggccgtattcggggcttatgaagcggagtggtataaagcaaaaggctgcagggatgaacaaatcatcatcacggggcatccccgtttcgacgagattttctcaagagagccgatagatcaggacacgttttaccgcaaactttcttttctcccgtcacagcggacggtgctgatcgccacgcagccgttttctgatgaattttatacgggcgtgcttgaagagcttgccggccaaaagaacatgcagctcattattaaaccgcatccatgggaaatcggcaaaaacaagctggatgcttacaatcaggtgctgcggaaatataaagcaggcaaaatcatcaaaaaagagatggagctgtatgatattctcccgtatgttgacgctgcggtgacacagacatcaacggtcggtcttgaagcgatgctgtttcaaaagcccgtgctgatcggaaaatcagcgggaacccgcagatacccttattatcactcacttggagaatttgtctttgaggacccgcaggcacttgctcaggaattgatccggatatgcgaaagccccgcagaatatcaaaaagcggaacaggcgcgccgtgcttttgtcgccgcgaactacccggttcaggattcgcttgccgctttatgccaagtgcttcaggaaaaaaccggagtcagcttcagacgggttgacccttcataaaaaagataggagcgcaaagaaaatggtgcaaaaaagatcagcttttcttccctattcattgcccatgatcgggaaggacgaaattcaggaggttattgatacgcttgaatcgggctggctttcaaagggaccgaaagtagaggcgtttgaaaaagcttttgccgcctggacgggggcaaagcacgcgatcgcgctgaactcatgtaccgccgctttgtttttggccctgaaagcgaaagggatcggtcccggcgacgaggtcatcacgtctgccgtgacgttcagttcaacggccaatacaatcgtgcacacaggcgccgttccggtgtttgttgacatcgatccgctttcgctgaatgcggaccctaaaaaaattgaggcggccgtcaccccgcggacaaaagcgattgtacccgttcatttcgccggccagtcgtgtgatatggatcagattctggccattgccgaaaagcatcagttatttgtcttagaggatgccgcacatgccgtgtataccacgtataaacagaaaatgatcggatcaatcggcgatgcgacggcattcagcttctacgcgacaaaaaacctggcaaccggtgaaggcggcatgctgacgacggacgatgacgggctcgccgatcagatcagggtgctcagccttcacggcatgagcaaaggcgcgtggaaccgctattcttcaaacggaagctggtactacgaggtcgaaacgcccggctataaaatgaatatgtttgatcttcaggcagcgcttgggcttcatcagctgaaacggattgacagcatgcagcaaagaagagccgacattgcgagccgctaccaggacgccttcagacacatgaaagggctgaccatcccgcatgtcagtgatgacgggcggcatgcatggcatctgtatgttcttcaaatagaggagcaggaggccggggtcagccggaacgatctgatttccgctttaaaagaccaatataatatcggtacaagtgttcattttattccggttccgttccatccgtattatcaaaaaacgtacgggtataaggagactgactttccggccgctgcagcgtattatcaccgcaccgtgtcactccctctttatccgtcaatgacagatgacgacgttgaatacgtcattgcagccgttacggatatcgtcaaaggggctgattaggtgtacagactgagggaaaatcttgcgcaggacatgattcataccttcctgcatcagaagggcattcagacggaagcctatgaatcgtcgctctgtttattggaagaaaacagccttcaaggcgtgattttatatgaaaactcttcgtgggaaagtcaattgttccgaaaaaatatcatcaatgtgaagcttgcagccgcaaacagcgccggacagctcaaaaggctgtttcaggaattttacgcggcaaggcgggcggacggcactgattttatatttattaaaataccggctgaagatatcggcgcgatgcaggtcgttcagcagcttccgaacgcttattttgtagggagtctgctcaagctcgtcagtccggtgcgtgtatataacagcacaccgccgtttgagattacagaagccggacccggcgacacggaagcgatcagccggctggcccgcgacgcctttacaaaaagcaggtattaccaagatccccgcctcagctatgaaagtgcaaaccgcctgtttgaagagtgggcgcggaataacgcggaaggcagagcttcgttacaattcgccgccacatataagggagagaccgtgggctttattcaggggctgtctaaaggcgatgaattcgtccttgatctgatggcggtaaagccgggctttgaagggaaaggagcgggattccatttagcggcgcacattattgaacaatcattgcgctttcagcataagactgtatcagcgggaacgcagctccacaatgtaagagccatccgcctgtatgaaagaatgggatttaaagcggatgcgtcctattactactatcatgtgtggcccgggaaggaggcggactgatggcatcatgccaaatcggaacgaagtcaatcggcgaaggttcgcccgtattcatcatcgccgaagctggaattaatcatgacggaaaactgagccaggcgtttgaattgatagatgcggccagtgaggccggcgcggacgcggtcaagttccaaatgtttcaggctgacaaaatgtatcagaaagaccccggcttgtacaaaaccgctgcgggaaaagacgtctcgatattttctttagtgcaatcaatggaaatgcccgctgagtggatcgaaccgctgcttgaatattgtaagaaaaaaggcgtgctgtttttaagcacggtatgtgacgaaggctctgccgacttactgtatgcgacttccccttcagcttttaaaatcgcctcctacgagctgaaccatctgccgttattgaaatatgtcgcggggctgaagaccccgattatcttctccaccgcgggcgctgatatttcagatattcaggaggcttatcaaaccattaccggcgaggggaacaaagaaattgcgatcatgcattgtgtggcgaaatatcccgcgccgcctgaatacagcaatctgagcgtcattcccatgcttgccgccgcattcccggatgcagtgatcggtttctccgatcacagcgcccatccgtatgatgtgccgtgcgcggcggtcaggctcggagcgaaactgattgaaaagcattttacgatcgataaaaacctgcccggtgctgatcactccttcgccctcaatccggatgaattaaaacaaatggttgcggcgatccgctcagttgaagcggagctgcggcaggggcatcacgcttcggtgccggaagtgctgtcgggaagctcccataaaaccacgacaccgattgaaggagatatcagaaggttcgcttacagaggcattttttcaacagcgccgattcaaaaaggcgaatgttttacggcggaaaaccttgccgtccttcgtcccggccaaaaaccgcaggggctccacccgagatattttgaacttttaactgacgggacgcgtgcggtcagggatatccccgctgacacgggcatcacttgggatgaccttttgacgaaaggcagcccatatgatgactgacattttgtttatcattcaggcgcggatgggaagcgggcgtcttcccggcaaagtgctgaaaccgatcggcgggtatacgattctcgatatgattgtcaaaagggttcggcaaagcgcgtattatgatcaatcgcgggataatctgatcgtcgccgcgtctgacagcaagaccgacgacattctgtctgcgcactgcctcagcaagaactaccgtgtgcaccgcggcagcgagcagcgcgtgcttgaccggtttgcacaagtcatcgaacgagtaaaaccggacatcgcagtcagactgacgggggataacccgtttgtcgacccttcgctgcttgattttctgattcaatcgcatttagatcagcacgcggactacacgtatatctgcggtacaccgcttggcatcggcggcgaggcggtaagcgcgcgacttttaacggagatcaatgccgacaaaacgctggcggacaaataccaggaacatgtcacgcttttaataagagaatctcctgagaggtaccggcttctctttcctgagcccccgcaggaactccgggctcctcacttgcggatgaccgtcgatacagaagaggactacaggctggcccgcgagctgtacgtaaaagcgggctcgcgtcctgatattccggcaaaagaattgatctatctgctgaatagtgatccggagctcagggccattaatcaaatgatccggcaaaaagaggctgattagcatgcgggttctgattttcgctgacgggggccgtgacatcggcatggggcacgcggtccggatgaagctgcttgccggtgccattaagaacaattgctcaataacgttctgcacaaataaagaggcttcttcttatctgtcatctgatcaatgggaagtgatcatcaagcctgacaagggacagaaggaatttattgtccgggaaataaacaggcaggctcctgaccttctcatattcgatctgctcgatatgccgtgtgactggttagaggaagtcaaaaagcattcatcggcacgcatcgtcttatttgaagaaaaacgggaacatgtcattcatttatgcgatgccgttataaacggcatttacggcgggctgaaaagccggacggtccaaatgggcagcgccgctgtatatgaaggcccggaatatatgattcttcatccgggttttgaaaaagcaaagcagctctatcaactgagaaaagaatgccggaccatattggtctcattaggaggaagcgacccgaagaagcttgtctttaaagtgatggaagcatgccgccgcatccccgacattcagcgaaaacgagtgatcatcgtcatgggcggcgccgcgcctcatgctgataacgtgcgcgcgcatcttacacaaatgccttatgccgagatggtaaggcagacaaatgacatggccgcgcttctttcgagggctgatatggccgtcgtgtccggcgggatcactttatatgaaaccatttgtacaggtgtgccctgcatcgtactttctcaagtggagcatcaaactgagacggcagaaaaattcgccgcacggggggccgccgttcatctcggccttggtgaatgcatatcaccggacgttctcgctcggcatatgtctgacatggccgctgattatccgatgcggaccggacttcatcaaaacggaaagccgctggttgacggcaggggcatcaaacgggcggcggcgattctttatgatttgtgataaaaccacacgtaaggaagtgttcatgtgaaaggtgttatcttagccggaggcaccggctcacgccttatgccgctgacaaaagcggtcaataagcatttactccctgtcggtccatatccgatgatttactggtcgatcatgaagctggaagaagcggggattacagatattttgctgattacgcaaaaagaatatattccgcaatttcataaacttctcgaaaccggagaagagctcggcgtctcaatcacatatcaggttcagccagccgcatccggcatttccgacggtttatcatacgcaaagcgatttacaggtcgcgatccgttcgttctgcttttgggagataatatttttgaagattcattaaaaccttatacggagcgtttcgcaaagcagggaaaaggagcgaaagtgctgctgaaagaagtggacgacccggagcgcttcggcatcgccgagattgatgaggaaaacaaacggatcaagtcgatcattgaaaagccggagcagccgccgaccagactatgcgtcacagggatctacatgtacgacgcagaagtgttttcctatattgaacaaatttccccttcaaaacgcggcgaactggaaattacggatgtcaataatttatacattgaacacagtgagctgacgtatgatgtgttaacgggctggtgggtggatgcgggcacgcatgaatcgctctacctcgccggaagcctggcgcatcaggcattacagaaaggacaggagcattaatcatgccaaaatcatatttaattacagggggcgccggatttatcggccttacctttacaaagatgatgctgaaagaaacggacgcgcagattaccgtcctggataatctcacgtatgcaagcaggccgcttgaaatagaagccttaaaaaagaacggccgtttccgttttatcaaaggtgacatttctgaaaaagaggacattgacaaagtcttttcccaaatgtatgacgctgtcattcattttgcggctgaatcccatgtggacagaagcataaatcaggcagagccgtttatcacaacaaatgtgatgggcacataccgactggcggacgcggtgttacagggaaaagccggcaggctgattcacatttccacagatgaggtgtacggagatttggcgccggatgatcccgcttttacggagacgacgccgctttctccgaacaatccgtattccgccagcaaggcaagctcagacctgctcgtcatgtcttacgtgagaacccataagcttcctgccatcattacaagatgcagcaacaattacgggccgtaccagcatcacgagaaaatgattccgaccattatcaggcatgccgtaaacggcacgccggttccgctgtacggcgacgggatgcagatcagagactggctgttcgccgaagatcattgccgcgccattaagctcgtgctggaaaaaggaacactcggtgacatttacaatatcggcggaggaaatgaacggacgaataaagagcttgcgtcatttatcatgaaggagctcggtgtcgaggaacggtttgctcatgtcgaagacagaaaagggcatgaccgccgttacgccatcaatgcttcaaagctgaaaaatgagctgggatggcggcaggacgtcacatttgaagaaggaatgagaagaaccattcgctggtatacaaacagccaagactaatcggaaagaaggggatccgattgacgaaggtattagtaaccggagcggccggccagctggggcgggagttatgccgccagctgaagcgggaagggtatgaagtgatcgccttgacaaaagcgatgatgaacatatccgaccagcgttcggtgcggcactcgttcagccattacaagccggatatcgtcgtcaatacggcggcatacacctccgttgacaaatgtgaaacggagctcgacaaagcgtatttaataaacggaatcggcgcttattatgccgcgcttgaggctgaaaacaccggcgcgaaattcattcacatcagcaccgattacgtcttcagcggcaaaggaacacggccataccagaccgatgatcccgcagatccgggcacgatttacggaaaaagcaaaaaactcggcgaagaactgatccggttaacgggaaaaaaccacaccattatcagaacgtcgtgggtgtacggcagcggcgggcacaactttgtcaatacgatgctgaaacttgcggatacacatgatcaggtgcgtgtcgttaacgatcaagtcggagcgccgacgtacacaaaggatttagccgaaacggtgatcggtctgtttgacaggccgccgggcttataccacgccgcaaacagcggagtgtgcagctggtatgaatttgccaaggctatttttgaagaaagcggcagaaccgcctccgtgctgcccgtcacgacggaggaatacggaaatgagacgccgcgccccgcttactcggtgttgagtcttgagtcgattgaacggcaggggctcggcatgaggcattggcgggaagcgctgcatgattatttacaaagggagggacagtgcaagtgatcgaaggcgtaaaaatcaaaaagctgatcaaacacagcgatgaccggggttttttctcagaactcgtccgtgacgatgaacatctcttagagcgtttcgggcaggcttcctggtccaaaagctaccccggcgtcattaaagcatttcactatcatgagaaacaggatgacctgtggttttttccgacgggccacgcccaggtcgtgctgcatgaccttcgcgaagagtcggcaaccaagggagaaacggatgtctactacatgggagaagacaatccgatgctccttctcattcctaggggcgtcgcacacgggtacagagtgctgggtgaaaccccgctgaccattatttatttcacgacaatgtcctacaatccggatcagcctgacgaaaaaagaattccgtggaatgatgacaccatcggatttgactggcagacggctcaccgatagcgcacaagacgaagacagcggatgtcttcgttttttgtgctgattcatctcgtgaaaaataaatgattgaatattctaaaaaataatttacttccatggataaaggtggtagattattctcaggaaaagagaaacccaattcgcgaatggaaccatcagacacgcttttccggcagaggacgctctgaatcccatatgatctggaggaattcatgatgttaaaaagaaaatcattttcggcctttctcatcagtgctgcggtattttcatctgtgttcttgccatcttttcatgcgaacgcccaatctgccgttattgaagcgaaaaccgtcaatagtacgaaagaatacgcgacgtctgatattgaagtcacatacaagccgaatgcgctgcttgccgtcggcgccgttgaatttcaatttcctgacgggttcaacgccactgtgagggactctgtaaacggaagaacactgaaagaaacgcaaattctcaactacggaaaaacggtcagacttccgcttacccttgacttattgggcgcgtctgaatacaatctcgtcctagtgcgtaaaaaccttccgcgcgcgggcgcgtatacaattaaaggcgattacgtaaacggtttgggggccggcagtctttatgccgaaacaaagctggttattgacccgcgttaatcggggatgaaagaggctgacaacagcctctttttttttatgcgcaaaaaacctggcatgaatcttgcatataaaaagggcgtaacgacaatgtgaaagggtttgatgggttttggtgtaaaagcgcttacattttgttctgccggtaattgaagcttacacgtaaaatacgatgaggtgataaacatgtcagccaacccgctttctaaaagcaatcagaaagatgaagaaaaagaagttcttaatttgttcttgtcaacacaatcgatcataaaagaggccctgcgcaaactgggctatcctgacaatatgtatgaactgatgaaagagccgatgcggcttttaaccgtccgcatccctgtcaaaatggacaatggctcagtacaggttttcacgggctaccgctcacagcataatgacgcagtcggcccgacaaaagggggcgtgcggtttcatccggaagtcagtgaagaagaggttaaggcgctttccatctggatgactttaaaatgcggcatcacaaatcttccttacgggggcggaaaaggcggcatcatctgtgatcctcggacgatgtcattcggagagctggaacggctgagccgcggatatgtgcgtgcgatcagccagatcgtcggtccgacaaaggatattccggctcccgacgtatataccaactcgcagattatggcatggatgatggacgaatacagccgcctgagagaatttgattcaccgggattcattacgggcaaaccgattgttctcggcggttcacaggggcgggaaacggcgaccgcgcaaggcgtcacgatttgtattgaggaagccgttaagaaaaaagggattccattggaaaatgcgcggatcatcattcaggggttcggaaatgcggggagctttctcgctaaatttatgcatgacgccggcgccaaggtgatcggcatctcagacgcccacggcgctttgtatgaccctgacggccttgacattgattacctgctggataagcgggacagctttggcacggtgacgaatctcttctcggatgtcataacgaacagggagctgctggaaaaggactgtgatattctcgtgcccgctgcaatctccaatcagattacggctgaaaacgcccatcacattaaagcttcaatcattgtggaggcggcaaacggcccgacaacgatagatgccacgaaaattctgaatgaaagaggcgtgcttctcgtgccggatattttggcaagcgccggcggcgtgacggtgtcttattttgaatgggtgcaaaataatcaaggcttttactggtctgaggaggaagtcgccggaaaactgcgcagcgtcatggtgaattcgtttgaatccatttatcagacagcgcatacccacaaagtcgatatgcgtttggccgcctatatgacgggcatcagaaaatcggctgaagcggcccggttccgcggctgggtataagtgttatccgcaaagagattttgcatcagttatatagcggatcgcaaaatttctttgcgttttcagattgcagctgacagattcggacaagcttcgtccgctttcggcaaagattttcttatttttatcacaaattgctatgctggtatgcttcttgcatcatcataaagcgtgagcacacattacaaaatacggggaggaattctaatgacagtttcatacgcacacgaaccatttacaaattttcaggaagagacaaataaacaatcgtttcaggaagcgctggcttatgtgaattcacagctcggcaagcattatccgcttatcatcaacggtgaagcgattgaaacggataaaaagatcatttccgtcaatccggcagataaaaaagaagtgatcggttctgtatcggccgccggaaaagaacttgcggaaaaggccatgcaggctgcgctgcaggcatttcaaacatggaaaaaagtacggccggaacaccgcgcgaatgtgctgtttaaagcggcggcgatcatccgcagaagaaagcacgaattctccgcgtatctagtgaaagaagccggaaaaccgtggaaggaagcggatgcggatacggcggaagcgatcgactttttagagtattacgcccgtcagatgctgaaactgaaagacggttcccctgtaaagagccgtgacggagaatataatcagtatcactatgagccgcttggggtggggatcgtcatctctccattcaacttcccgcttgcgattatggcgggaacggcggcggcagccatcgtaacaggcaacacgatactgctgaaaccggcggatgcggcgcctgtcgtggcggcgaaattcgttgaagtgatgaaagaagcgggcctgccggacggcgtgctccaattcataccgggcgacggaggagaaatcggcgactatctggttgagcatccgaagacgagatttgtgtcgtttacaggttcccgcgcggtcggatgccgtatttatgaacgcgccgcaaaagtacagccgggccaaaagtggctgaaacgggtcattgccgaaatgggagggaaagatacggtgcttgtagacagagatgctgatcttgatcttgccgcttcctcaatcgtgtattccgccttcggattctcaggccaaaaatgttcagccggttcccgtgcggtcatccatcaggacgtctatgatgaagttgttgaaaaagccgtcgctttaacaaaatcactcaccgtcggaagtccggaagattttgatacatacatggggccagtcatccacgaagcatcttataataaagtcatgagttatatcgaaatcggcaaaacagaaggaaaactcctgacgggaggcgaaggtgatgattcaaaaggatactttattcagccgaccatttttgcggatgttgatgaaaacgcccgcctgatgcaggaggaaattttcgggccggtcgtcgcgatctcaaaagcccgtgatttcgaccatatgcttgagattgccaataataccgattacggactgacgggcgctctgttatcgaaaacccgcgcgcacattgaacgcgcccgcgaagattttcacgtcgggaatctatacttcaaccgcggatgtacgggagcgattgtcggataccagccgttcggcggtttcaatatgtcaggaaccgattcaaaagccggaggacctgactatctgattcttcatatgcaggcaaaaacaacgtctgaagcctattaatctttcggaaatagcgcgatgaaaaagagagtcgcgctattttctctatatgagggtaaggaggatggaatatgtatcagcagctcagcaaaatgcttccggaggagaaaatagaagccattacaaaatcactggtggcgttaaacagcatcaacggcacattgggagaaggaaaaaaagccgactatatcaaagatatgatcaagagctttccctactttcaggagaatccgtcacatgtgtgggagcaggcgattcctgaggacccttacggccgcaaaaatattttcgcatttattgagggtaacggcgaaagcctgaatacggtcatttatcacgctcatcttgatacggtcggcatcgaggatttcggccctttaaaagatatcgcttttgattccggccgtctcgcggagtatttctcaaactatgaatttgatcgggatgtgcagcgggacgcccgctcaggcgagtggatgttcggaaggggttcggttgatatgcagagcggtattgccgttcatctcgccaatctgcttcacttttctgaacggcgtgatcagctgccgggccatattctgttcatggcaaacccggatgaagaaagccagcattccggcattttaaccagcatttctgaattaaaacggctgaaacaagaaaagcagcttcgttatttagcagcgattaataacgattttatcaccccgctgtatgagggtgacacgacaaggtacatctacacgggcgcggcagggaagcttttgccttgctttgcgatttacgggcgggaggtgcatgtcggtgatacgctgtccggcatcgatccgaatttgatcgcgtcagaaatcaccagaagaattcacaacaatattcatatggcggaaaacattgaaggggagcttgtgcttccgccgacctgtctctaccagcgagacaacaaggaagcgtataacgtgcagaccgccgtcagcagctatgtctattttaattattttatatacgagaaaaccgccaaagaagtcatggatcagctgaccgccgtggctgacgaagcctgcaaagagacagaacgaaaattatctgattattacgacgaatactgtgagagaacgagcttgccgaaaaaagagatgtcatggaacgttcaagtgtacagtctggaagattacctgaaaaggctgagaagccgcgggatagaccctgcacagtgtatcgggcaggcatttaaaacatatgaacatcttgaactgcggatgagatgctttaaagccgtcgaggaactgcaaaaactcgatcctgagcagggagccaaggtcattattttctatgcgccgccttaccttccgcacaattatctgaaagaagagagcacacgggaccggcttttgcagcatgtcattcaagaagcggtcgataaaacagcggcgtcaaccggagaaacattcgcctttaaaaagtttttcccttatttagcggacggaagctttttatcgctgcatgaaacagacgaggaggtctccgcctttaccgataattttccgggctgggatgtcatcgggacgattccttttaaagaaatcagggaattgaatattccgtcggtcaatataggggtatacggaaaggacggccataaatggacggaacgcgtgtacaagccgtacacattccatgtgctgccggaactcattcagcagacgacaatgcaccttttgcacagctaccgattagacatacgcacaaatggctgacataacggaataagggggatgtatatgcagggagataccaatcaaactgaattgcagcgcacgatgaagggccggcatttgtttatgatcgccctcggcggcgtgatcgggacggggctttttctgggctccggttttacgatcagtgaagcgggaccgatcggcgcgatattggcttatgtgatcggcggatttttaatgtatctggtgatgctttgtttgggggagctcgcggtcgccatgccggtcgcaggatcatttcaggcgtatgcggcaaagtttctcgggccgtcgacgggatttacgatcggatggatgtacgcattcagctgggccaatacagtggggcttgaactgacgtcggcggggattttaatgcagcggtggtttccgggcgttccgatttgggtgtggtgccttgtattcggcgtcgtcattttttccattaacgcgctgtctgcgcggagttttgcggaaatggaattttggttttccagcattaaggtcatggccattgtattgtttattattctcggctgcgctgcggtattcggctttgtcggttttaacggcgggcagacggctccgtatctgtcaaactttacgacggacaaagggcttttcccgaacggtgcccaagccgtgctgtttacccttgtcatggtgaatttttcattccagggcaccgagctggtcggaatcgcctcgggagaaagcgaaaatccggaaaagacgcttccccgctcaatccgaaacgtcatatggcggacgctgtttttcttcgtgctggcgatgtttgttctcgtgtccattttgccgtaccaaacggcaggcgtcatcgaaagcccgtttgtggctgtgctggataaaatcggcgttccctatgcggctgatatcatgaactttgtcatcctgaccgccatgctgtcggtggcgaattccgggctgtacgcttcgtccagaatgatgtggtccctatcaaaaactaagatgggtcccgcttccttaacgaaactgacgaaaaaaggcgtgcctctgaaagctctttccatcaccatcgctatctccggtttatccctgctgacaagtgtattcgcggctgaaacggtgtatgtgtggctcatttccatctccggtatgattaccgtcgtcgcgtggatgtcaatctgcgcttcacaattcgttttccggagacgctttctcgctgaaggaggaaatctgaaagacctggcatttaaaacgcctctttatccgatcgtgccgattctcggattttcggtttacggtcttatcttaatcagtctcatctttatccccgaccagcgtatcggtctgtactgcggcgtcccgctgatgatcatctgttacgcgtattatcacttcggtattaaaaaacgcctgaatcgtgagccggcttcttcgaaaaaaggcgctgccggataagaaaaaaagccctccgcaaaaagcggcgggctttactttgtttttcgtttggccgacagcacataggatagaacggcaaagaactcaaaaccgaaaatgctgacggccatcggccaggcattttcttctccggcaatcccgacaaggggagcggcagccgcaccgccgataaagggcaggagtccgagaagagccgcagcgcttcccgcgcctttctcctgtttctgcatagccagagaaaaccctgtcgtcgtgacgatcccgacagaagaaacaatgatgaataaagaaatgcagaccgccgtcaggcctaaaccaaacgcaagtgataaaagcaaagcgatgcttccgatgacggcgatcaaaagcccggagacaaacagcttccgttcatcatgtgttttggccatccgtccggtgatttgggttgcgcatatgattcccgcaccgtttacggcgaacagcaggctgaacatttgcgccgatacgccgtagatgttttgcagtacaaacggcgacccggcaatatatgcgaacatgccggtcatcacaaatgcctggctgagcgcaaatcccataaacatccggtcgccaagcaggccgcgaaacgtcatcagcgtctcccggagtccgccgcttgtccgcttttccggcgggagtgattcaggcaacgccgtaagcacggcggcagtaatgatacagccgatcaccgccagcacgacaaatacgattttccagccggcaaactgaaggataaatccccctgtaatcggcgctaaaatcggtgccgccccattgacgagcatcagtaatgagaaaaaagccgtcaattcttttccggaatacatatcgcgtgcggacgcccgtgcgatgacgattccggccgccccggtgaatccttgaataaacctcatgacaattaaaaacgaaacagaagggctgaaggcgcataataaagaagacagcgtataaagcagcaatgacagaatgagcggcttccggcgcccgatcatatcactgagcggcccgacaacgatctgcccgaccgccagccccaaaagacaaaacgtcaggctcagctgcgcaagtgacgctgtcgtatgaagatcggccgccacttcaggcaaagcgggcagatacatatcgagcgaaagcggcccgaatgaagcgagcgtcccgagaatcagtaccatgccgaggcctgcgcgggcggcctttgaatcagcgttattcatttcatgacccccaccttaacaaatgattctatcactatagcataaccggacgacgtattttatatcatttgttgaatacaaactaaatattttatttaaaatctgaatgtaaataagaaaacagaattagttttcatttgaaatgtaaaatgaaacataaggatgctaaactataaaacaacaaaaggtagaaaagttttacggaagaggtgttcaaagagcatgaacagcaaacaaaccgatcacatcgaaacgaaacgccgatttccgatctgtctcgcgcttgctttgacattaggcgtatttgccgcgggttctgaagagctggtgatttctccgctgcttccggatttagcgcgggcattcagctcggatgtcagtgtgctggcgctttccatcagtatttacggagtgatgatttttatcggtgcgccgcttctcgttccgctgggcgataaatattcccgggaactcagcctgatggcggggctgcttatatttacggccggcacggtgatctgcgcgctggcgcacaatctctttttcttctttctgggcagggcgctttccgggcttgcggcgggtgcgtttgtgccgacagcttatgcggtggtcggcgaccgtgtgccttatgcgtaccgcggcaaggtgatgggtctgatcgtgtcaagctggtcgctcgctttgattttcggcgttccgatcggctcttttatcggcggcgttttaaattggcggtggacgttttggattttcgccctcatgtctgtcctcgttgcttcgctcattttcattgaggcgcgccgcagcacggcggatggggataaaacagaagaggaaaacggccggcaggcaggcactttccgggatgcgctgaaggtgccccgtgtccctgtatacctcacgatcactttttgcaacatgatcggtttttacggcatgtattcctttctcggcacatatcttcaccgcgtgctgccgggggggaatacagcttcagggctgctgatcatggtgtacggaatcggtttttccatgagcgtgttcaccggaaaaatcgcagataaggcggggaaaatgcgctctttgatcgcggcattggccgtgatcagcatatggctttcctgtctcgcctatgcgccgtcatcaatgccgtttttggttatcgggttattcgtctggggattgatgcaaagcctgacggtgaccttgctcagcaccattttaagtgattgctcacagagccgccggggcaaaatcatggcattttacagtctggcgtccaatttggccgtcaccttgggttctgctgtcatgggtccggtctatgtcggatacggatatgcggctgttggatttatctgtgcggccgtcaccctcatcggctttgtcctcagcgttttcgcatacagaaggtatgggaaatatgagcatcaggccgaccaatcattgtatcggtaaaataaagtttctataattttgtaaatgttaatttttagcaccctatttcatagggtgttttctaatatataggaataattatcaatattttcaaataatattgacagcttgaacgtctatggataatatttacttaaaatttaacagattggttggtgctcatgattatattggataatagcattcaaacgaaaagcaaggcttattcaatatctaaactgattacgatcaacacgctcggtcctgaagggacaagcagtgagtacgcagcaaaaaacttcatcaccaattttacccttctccaaggggtgaacagtaaattatcactgcatgatacatttgaatcgtgcattgaaaaaacgcttcaaagtccgctggaatacacaattgtgcctcacgcgtatgacggcattaagcacttctacatgagaccggatctgcagcttctgcaaattttcaggtgcgacaccccgatgtacggcctggctgtccggcccggttttgaatatacggatgacatgcttgatcagactgtcatcgtatcccacccgtctcctatcaatttgattaagtattttacccgtaaagatgtcacgtttgatctggtgaactcaacgagcgcagccgcgaaaagagtgaaggacggtttgtccgacatcgcgctgacaaatgagctggccagacaaaagtacggccttcactttgtcaaaacatttaaaagcattcccatgagctggtcattattcggaaaaggagagattcatgatgaaaactgaacaagatttgcaggaactttatttcccgacgcctaaattaatagaatgggataacggagtaagacaatattcgtccgtcagaggagatacggaagttctgctttcttacgttccgccgcatacaaacgtggaaccgcatcagcataaggaagtccaaatcggccttgtcgtttccggcgagctgtccatgactgtcggagatgtcacaagaaagatgacagcgctggaatcagcctatatcgcgcctcctaatgtgcctcacggcgcaagaaatgagacggatcaagaagtgatcgccattgatattaaacgcctgaaagccggtgaaacctacacaagccctgaagattattttttgaatatttttaaaacgagagacttattgcccggtatggaagtcacgttcttcgtggaagactgggtggaaatcatgcttgccaacattccgggcaacgggggagaaatgccgttccataaacaccgcaatgaacagatcggcatctgcatcggcggcggctatgatatgaccattgaaggctgcaaagtggatatgacattcggcacagcttatttctgcgatccgagagaagatcacggcgccatcaacagatttgaaaaagattcaaaatcagtcaatatctttttccctccgcgctataacagagcaaaagcgaaaaaattagaggcggaagagtcatgaacctgacggataaaaccgtcctcatcacagggggcgcatcaggcatcggttatgccgcggttcaggcgtttctgaatcagcaggcgaatgtggtcgtcgcggatattgatgaggcgcagggagaagcgatgatcaggaaagaaaacaatgacaggctgcattttgtgcagacggatattacagatgagccggcatgtcaaaacgccatccagtcagcggcggacaagttcggcggattggacgtgttaatcaataacgccggcatcgaaattgtcgccccgattcatgagatggagctgagcgattggaacaaggtgctcaacgtcaatctgacgggcatgtttcttatgagcaagcacgcgctcaagtatatgctcaaaagcggcaagggcaatatcattaacacgtgctccgtcggaggagtcgttgcatggcccgacattcccgcatataacgcctctaaaggcggcgtattgcagctgacgcgttcgatggctgtcgattacgccaaacacaacatccgcgtcaattgcgtgtgcccgggaatcattgacacacctttgaatgaaaagtcgttccttgaaaacaacgaaggcacgcttgaagaaatcaaaaaagaaaaagcgaaagtcaatccgctgctgagactcggcaagcctgaagaaatagcgaacgtcatgctgtttctcgcgtcggatttatcaagctatatgaccggaagcgcgatcaccgcagacggtggatacaccgcacaatagagaaggagtgtttacatatggagagaaaaacagtattggttatcgctgaccttgggggatgcccgccgcatatgttttacaaaagcgcagccgaaaaatacaacctcgtcagctttattccaaggccttttgcaattacagcctctcatgcggcattaattgaaaaatactcggtcgcggtcataaaagataaagactattttaagagtctggctgattttgagcatcccgattcgatttactgggctcatgaagatcatgacaaacctgaggaagaagtagtcgaagaaatcgtcaaggtggccggcatgttcgcggttgacgccattacgaccaacaatgaactgtttatcgctccgatggcaaaagcgtgtgaacgtctcggcctgcggggagcgggcgtacaggccgctgaaaatgccagagataaaaacaaaatgagagccgctttcaaccgggccggcgtcaagtctatcaaaaacaaacgggtgacgacgctggaagatttccgcgccgcgcttcaggaaatcggaacgccgctcattctaaagcctacatatctggcgagctccatcggcgtgacgctcatcaaagagagggaaacggcagaagccgaatttaacagagtcaatgaatacctgaagtcgattaacgtaccgaaagcggtcacgtttgaagcgccgtttatcgcggaagaatttttgcagggcgagtatgacgactggtacgaaacaagcggttattccgactatatcagcatagaaggcatcatggccgacggagaatacttccctgtcgcaattcatgataaaacaccgcaaatcggattcacggagacatcgcatattacgccgtccatcctggatgatgacgcgaagcggaaaatcgtcgaagcagccaaaaaggcgaatgaaggactcggcctcgaaaactgcgcaacacatacagagattaaattaatgaaaaaccgggaagccggactgattgaatcagcggcacgatttgcgggctggaacatgattccgaatattaaaaaggtcttcggcgtcgatatggcgcagctgttattggatgttctctgtttcggaaaagaagccgatctgccgaaaggattattggagcaggagccatgctatgtcgccgactgccacttgtatcctcagcatttcaaagaaaacggccagctgcctgagacggctgtcgatttcgtcattgaaagcattgacattcccggcggcgtcttaaagggagacaccgaaatcgtttctttctcggcggccgaggcgggtacatccgtggatctgcggctgttcgaagcgttcaacagcattgcggcgttcgagctgaaaggaagcaattcgggtgacgtggccgaatcaatcaaacaaattcagcagcaggcgaagctgactgcaaagtatgcgttaccggtatgaaacagctgaaaccgaactctaagtatttgcttttcgggcaggcgctttcgtttatgggagactattgcgttctcccggctctgctcattttgtctacatactatcacgactactgggtgacgtccggcgtcatcgcggtccgcagtattccgatggtgtttcagccgtttttaggcgtgctcgtggaccggctcgacagggtgaaaatcatgctgtggacggatgtgatcagaggcgtcatctttttggggctgacatttctcccgaaaggcgaatatccgctgctttttctggcgctgctgtttgtttcttacggaagcggcgtgttttttaacccggcacgtctcgcggtcatgtcgtctttagaagcggatattaaaaatatcaacactttgtttgcaaaagccacgacgatttcgattattgtcggcgctgcagccggcggactttttctgttaggcggttctgtggagcttgccgtcgcgtttaacggggtgacctatcttgtctccgcgtttttcatcagccgcattaagcttcaatacgtgccgattcagtcagaaaacgtaagggaagcttttcagtcgtttaaagaaggcctgaaggaaatcaaaacaaatgcttttgtgttaaacgccatgttcacgatgattacgatggcgcttttgtggggtgtcgtctacagctatttcccgattgtcagccgctttttaggcgacggggaaatcggcaatttcatcctgacgttctgcatcggcttcggcggctttatcggcgccgctcttgtcagcaaatggggctttaacaacaataaagggctgatgtattttacagtgttatcgatcgtctcgcttgcgctgtttttgtttaccccgattttcgccgtgtcagtcattgccgctattcttttctttatcgcaatggaatacggtgaagtgctggcgaaggtcaaagttcaggagaacgcggcgaaccagattcagggccggatcttttcggtggcggaggcgtccatcggattgtgcatcgctgtcggttccatgctgatcaatattgtagacgcggcagtcatcatggcgtttatcgtccttttggtcagcgggctgtttctgcatacaaaactggtcaataaatccttttcagaacggaataacgaatcagagcaaattcatttataaggagcctttcagatggaaatcataccgtccgacgtcatcaagacacttccgaaacaggaattttcgctcgtttttcaaaaggtaaaagagatggagaaaacgggagctcagatcattaacctcgggcaggggaatcccgatctccccacaccgccgcatatcgttgaaacattgcgggaggctgcgctgaatccttcgtatcacggatacggcccgttcagaggctatccgtttctgaaagaagccatcgcggaattttatgagagagagtacggggtatcggtcaatccggagacagaagtcgcgctgttcggcggagggaaagctggtttgtacgttttgacgcaatgcctgctgaatcccggcgatatcgccttagtcccgaaccccggctaccctgagtatttatcgggaattacaatggccagagcggagctgcatgagatgccgcttcatccggaaaacggctatttgccggattttgagcggattgatcccgccgtcctgaaaaaagccaagctgatgtttttgaattacccgaataacccgactggcgcgactgcggatcaggcgttttatgaaaaagcggcagcgtttgcaaaaaaacatgacatccaccttattcacgattttgcatacggcgcgttcgaatttgatcagaacccggccagctttcttcaggcgaaagaagcgaaaacggtcggcgcggagctttattcattttcgaaaaccttcaatatggcaggctggagaatggcatttgccgtggggaatgagaaaatcattcaggcggtcaatgagtttcaggatcacgtcttcgtcggcatgttcggcggtcttcagcaggcggcagcggcggcgctgtcaggaagtcctgagcatacggagcgtctgaagcgcacatataaagaacggattgactttttcacggcgttatgtgaaaaggaattaggctggagcattgaaaaaccgaaagggactttttatgtatgggctgaaattccgaatgaattcgagtcttcacaccagttttcggactatctgctggagcatgcccatgttgtcgtgacgcccggcgagattttcggcagcggcggaaagcgttatgtcagaatatcaatggtggcaaaacagggtgatttaagggaattcgtgctgcggattcaaaagctcggtttgtcctttccttcattacaagaaacatcccgctgagagcgggatgtttttattatatgcttttcatgctgccgccgtcggctgacacttgctgtccggtaatataggaggcttcttcagaggcaagaaaggcagccagcgccgcggtttcttccggagttccgacacgcttcatcgggacgcctgatgcaatccgttcttccgcttccgctttagaaatgccgttttgcttcatgacattcttcacgaattggtgataacggtctgtggcgataaacccgggattcagacagttgacagtaatgtgaaaaggcgcaagctgaatggcgatgtttttgctggcattaattaaagcggcgttcatcatgctgttggtaaacatattggcgccgggttctttccataggtttccgacgatattaatgattctgccgaattcgtgctgtttcatgattgctgcggccgttttcatagagtcgatataagcgattgttttattcgtaaaggtatttgtcatatcctctatatcgcagttttcaaaggtatccggcgagccgcccggaatgttgttgatcaatacatcaagccgtccgcattgtgatctgatctcttcaaaaatgccggctcttgtcttctgatccgacatatccccggccagaacggtgacgcccgcatccggatgtttggcgaggatctcttcttttaccgattcgatattttcgggaactcgagaattaatgacggtatgaaagccattgtccgccagtttcagagcgatcgctttgccgatcccctgactggctcccataataaacgcggttcgttttgacaactgtctgcacccctttaccaaaatggaatctcctttacatcgtaaaaaaaaatgataaaaatagcaaattttatttaaattctgacaaaggaaaaacccgccggacaggcgggtggttgttacacgtgcaaaaacttcggaagcgtgtcaagagacaagcggtttccgacaaaaaatgaaccgaattcgccgtagcgcgcgctgacttcatcaaagcgcatttcgtaaacaagttttttgaactgaagcacatcatcgctgaagagcgtgacgccccattcgtaatcgtcaaaaccgacagatcccgtgataatctgtttgactttgccggcatagctccgtccgatcaagccgtggcttctcatcaggtttctgcgttcatccatagaaagcatgtaccagttgtcattgccgcttcttcttttatccatcggatagaagcagacgtatttcgcttcgggcagctcaggatacaggcgggcgcggacatgcggattttcatacggatcgccttctccgcttgcgaggtagttgctcagctcaaccacggacacgtaagaataagccgggattgtaaattcagcaagctttgatttgttaaattcaagctcgatttcgttcagctcttccattgtcgggcgaagaatcatcagcataaaatcagctttctgtccgacgatgctgtagatggtttgcgagcctttgccttctttttgggcgacaccccatttttcaagcagtcccgtaaattcgtgaataatcgacaggcgctcatcgctggataacatcttccatgacgtccagtccattgtgcggaaatcgtgaagcgcgtaccagccgtcaagcgtttgggcggcttcgttcgttttttgctgctcactcatgtatcttcactcctatatcttttcattacattgatgccttcactatatcacagtttaaccgtttcggctgtggagaaaccttgaataatccgaagccttgtgtcagaaactatgccgtgaacaaacggtcaattaaattagttagaaaaataagatttctttttgaaagcgctataatagaagttggttatttgaatttagctggaagaagagtatgctgtaaaagtaagcgttttttgtcaacatagaggagggtatatcgtggcagatttatttacaaaagtacaagaaaaagtcgcaggaaaagatgtgaaaatcgtatttcctgaagggttggacgaacgtatcctggttgcggtcaacaacttggcgggcaacaaggtattaaagccgatcgtagtcggcaataaagaagacattcaagcaaaagcgaaagaattaaatcttacgcttgacggcgtggacatttttgacccgcatacatatgaaggcatggaagaactcgttcaggctttcgtagaacgccgcaaaggcaaagcgacggaagaacaggcccgcaaagctttgctggacgaaaactatttcggcacgatgcttgtgtacaaaggtctcgcagacggacttgtcagcggagctgcacattctactgctgatacggtgcgccctgcactgcaaatcatcaaaacaaaagaaggcgtgaaaaaaacatcaggcgtcttcatcatggcccgcggtgacgagcagtatgtgttcgctgattgcgcgatcaacattgctcctgacagccaggaccttgccgaaatcgccattgaaagcgccaatacggctcaaatgtttgacattgacccgcgcgttgccatgctcagcttctctacaaaaggatcggcgaaatcagacgagacggacaaagtggctgaagcggtgaaaattgcgaaggaaaaagcgcctgagcttacgcttgacggcgaattccaattcgacgctgcatttgtgccgtctgtcgcggagaaaaaagcgccggactccgacattaaaggagacgcgaatgtatttgtattcccaagccttgaagcaggaaacatcggctacaaaatcgctcagcgcttaggcggctttgaagcggtcggaccgattctgcaaggattgaatatgcctgtaaacgatctttccagaggatgtaatgcggaagacgtctacaatcttgcgttaattacggctgctcaagcgctgtaatccgcaaaagccggcctttacgagggccggcatttttttatagaaagaacgtcactgcggcccagccgaacagggacaaacagagagaaccgatcaagcctgctgcgagcgcccgccagccgttatgacgaaacgccgatatatggactttcaaaccgagacccgccatcgccatgccgattaaaacataagacacttgaacaagaaacgcggaaaacgaggctgaaataacgcctgatgtatggatggcgctcattccgagaaatccgaagataaaccaagggatggggagcgaagcggcagaagccgtctttgactttccgctgcggcgcgcccgcattccgagcatgaatgcggccgggacgagcagcgcgacccgggtcagtttgacgatcaccgccatctcgacggctgcttttcctccggcgctgccggccgccgccgcatgcgccacctcgtgaagcgttgccccgcaaaaggctccgtaagccgcaggagaaaagcccaatccatgataagcaagagaatatacaacagtaaaaacggttcctaataacgaaacggcggccgcgctgatggcggctgcattttcatttgatctgatctgcggcgcgatcgcggcaatggcagccgccccgcagatcgctgtgccgcaggctgtcagcgtgctgagtgtctgatctatacggaacagccgggacagtccgtatacaacggcacccgcaaacatcatacagcagacggcaattgcaaatacgtgccagcccgcatgatagatatccgccagattcagtctcatgccaagcaggatgatgcctgctttcagcaagtatttgcttgagaacgcgatccccggctctaatgccgcccgctgtccgaatacggcgcgccagagcatgccgatcagcattgcaaggacaagcattccgagcatttgcaaaaacggcaggcggctgacatagaaagccgcaaacgcaattcctgcggtaactgaaacaccttttaccatcttcatctcagtcacttcccattatcttgataactccactttactgcggtcttaatcattagtaaaatatatttatatgatctaaacgattaggaaaaataatgattaggggcgatgctttttgtattatggggaactgaaaacattcattgccgtcgtggaagaaaaaaactttacaaaggcggcgcagaagctgatgatttctcagccgagcgtcagccttcacattaaaaacctggagaaagaatttcaaaccgccttgctgaaccgctctccgaagcactttacgactacgccgacgggggacattctctatcagcgcgccaagcagatggtctttttgtacgaacaggcgaaatccgaaatttacgcccatcatcattatgtcaaagggaagctcaaaatcgccgcgagctttaccatcggcgaatatattctgccgccgcttctcgcaaagcttcatgacgagtatcccgagctgaacctggacgtcatgatcggaaacacggaggaggtcagcgaagcggttcggatgcttcaagccgatatcggattaattgaagggcatacggggaaaaacgagctggacattcagccgtttatggaggatgaattgtgcattgccgcaccgaacggacacccgctcgccggcagaaaaaacatcccggctgccgaattgcaaaatcaagcgtgggtgacgagggagaagggttcgggaacgagggaatatttagaccacgtccttcaatcaaacggactgcggccgaaatccatgatgacgatcagcagcaaccagggcgtcaaagaagccgtgatcagcggaatgggtctttccgttctgtcaaaaagcgtgctgcaaaaggatctgcttcacggcagcatttccgtgcttgagataaaaggattctccttaaaacggaaactgtctatcatccaatcttccattatggagaacacaaaaaacaaagaaatcttcatcgctctattgaaaagccaatttcaatcatcacaagcggagtgatataataaatgcatggaaagcctatgacgaaagggatttaaaatagatgggaaagcaaccgattgatttactgatgcagccgagctggagaatcattgaccaatccagcctcggcccttattttgatgcgaagcagtcattcgcaatggatgatacgttgtgcgcctccgtaggcaaaggggaatcgcctgcgacggcacgctcttgggtgcaccaccggacgatcgtgctcggcattcaggacacgcgcctgccgtttttagaggacggcgtgaaattgctggaggacgaaggctatcgtgtcattgtccgcaattccggaggcctcgccgtcgtactggacgaaggcgtattgaatatctcgcttatttttgaagacgagaaaaaaggcatcgacatcgacagaggctacgaggcgatgacagagctggtgcggcggatgctgcgtccgcaccatgccgaaattgaagcatatgaaattaaaggatcgtactgtccgggcagctatgatctcagcatcggcggccgaaaattcgcgggaatctcacaaagacgcctgcggggcggaaccgcggttcagatttacctctgcgccgataaaagcggaagcgaacgcgccgatctgatcagacgtttctatcaagccgctttaaaagacaaaagcaacgatacaaaaggcgtatatcccgatatccggcccgaaacgatggcttcattaagcgaattgctgcaaacggacattaccgtgcaggacttaatgctggcgcttttgactgaactgaaggaactcagcggacgcctgtatgcagccggattatcgccggaagaggaaatggtatttgaaaaaaatctgacccgaatgctggaacggaatgagaaggtgttcggcacgcaggaaagcttggactaagtccgggcttttttttgtttttggtaattatatactatttagttatagtgaaaaaagaagtgttatatgaaaactagtttacattatataccttatttgattaatatatttatgtaggttccaaataattctataaactaaaggagatggagatatgaactttaaaaaaataaaagaagaaaaaagaatcacgatcccgacacatttgttagccggagatgcggaacaatcaggcaattctttcgcttggagcggctgggtgcttgtagtgccgagccaagaagacaatcaaaacccgaatttgaatttctctgatttagccgctcaaaagtaggataatcactgtttggagcctacacatctgagacgaggcggtgagagtgtgacacaagagtatataacagaaattaagcggggggcactgtcatggattgttaaaaatatccattattttgatatgaatcataaagtagcgaatgatttcaggtggcgccttaaaacatttatagaactcatttttcttaccaattacctgatcagaaatcaggcagatgataaggaagttgctgttttaacggagtttattacagaaaggctccataatgatcagcttgaagaatttattcattttgatccggacggtctcgccggattggctatcgcgggtgaatttcttaccttgactgatcatccgtcacgggcttcggtgatatgggagctggaaaaattcacggcagcacgttttgattgcagccttgctaaaattccctttcggaaaatggatctgaagtacagtctgcaaagagcaggcgtaacctcggaaataacggatttttctgacttatatcactacacagcagctggtcaggatatcccaaatacatatatgacggatcatgatgcgtacagtatcactcatacgattttttatataacagacatgggatgttcttcgcttacggataaagagtatcatctgccgtccttaaaagaaaaggtcctgaaatttctcgggatctatatctgtcttgagaatttagatattaccagtgaattattgatgtgcagctcttttttacatatcgacatggataaggacaaccataaaccgctctatgaagcagcctggaataaaatctatcagggccgaatgaaagaggggaatgtcccgagcatcacctatcaacataaacccggtttgaaaggtgaacagcgaagagaagatgtgtttaaacattgctatcatacaacacttgtcgccgcgggtgccgcgcatgcctgtcttagagcagaaaggaacgattaacttgaatagattagctgaagagacagatcaatttttattatcttttgctgaacaatcgcttccggatcaaaagagcattcagctgtttgccggcttctgcaagtactacaggaagacgagccattcttccgctgtaaaagaacatactgaaaggattgcctccgctttcgttgataagtcatgctgggaagatctgtttcactgtaacacggccattgtcaatgagttgattcatatctatttaacggcaaaagcttataaaaagaagcagggaatggattcggatgatcaggtcatacgtcacggattgcaaaacggctatcttataaaaaaagaatggccttattttaaatacgccgaattcgtcggtttgctgagcgagctgggaatgtcaactgaccatgaaaaagtgcgcttttacaagaattcgatgtttcagcctttgctccatgacgcatggaaaagaacagctgaaaacgagctggagtttgtcgagtactgtcttcttcatttagatcagggagagcatctgcttcatcccggcttgaaggcttccattcaaaaatggcttgtgttttgtctcggcagccgaaaaatgaaacagctgtgcaatatgttatttatccaatcgtgtatcgatccatttttttatggctgtcaagcggctcttcatcatataaataacgagaatccatccattcattgtgctccggctcttctgccggcgattgagattctgaatctggagtgtggaacatgcagatagtcaaggaacattttaatataaaaaaaacagaagaatggctgctgggtttttggaagaacattcagctgcagccggaagaaatggaagcagatgatttcatgcacctgttttgcggtttagcggcatgtcatcattttgaaagcagaaaggatacagaagaagttattctattcctagaccgttatttcggagaaaaaacacacgaatgccatccggtcctgttcgcgtatgcgtatcatgtgtaccgcaggatagatgccgcaaaaagcatcttttttcataacggacttgaacaaatggtccgcggtttacaagaggaactgaaatcagagccgtcctctatgatcctcatggtgttaggagcttattttggggcggtgactccggaagaactgatcgtgttcttagaaaccgggatgaaacgtgaggccgatttgctcatggcaccgggcggcatgcaggaagaacaggcggatgccctttatgccgtcacttatttgcaaatgaaagaattgcagccttttctcacggaatggtacaaaacatcagactttgctttttcaggtttaatgttagccgagtgcagaaagtatcacattgacgccgttgcaaaatacacagccattatgaaatttctccaattcgatgaggcgctttttatacgggaagggcgggaatttctacgctttcagcagcgaagcagcgggagcttcggttatttgaatccattagcgatggaccaaggggcggtcagcggcaaattactggaccgtcagtatttcctgccgtccgctcattatgccgccgcctctctgtctatgctgtaatgtctctcttttgaaagacggaaaaagaaatcaataaacatataagaaagtagatcgctataaccgtcatggaataggggatgtttaacgttgaaatcgcatcacccgcacttttatttacataagcaacgagatttaaatgcggaaagagcgtaaatttataccacgtaaattgggcaagcaaatcagttccgcccaatatactgccggcaaacagcagtaaaatggataagcaaagggagagcgcctggcttttgcacaatactgacaaagtgaacgcaatggtgacaatgcttataattgatatgaaacgcaaaagcagaatgattccggatgctttgattgaactgatggtatacagactgtcatttaaatgagtatagacgagcggatatgaagcattggaaaaaccgaataacacgccgccgatcagcaaacagctcacacagtaaaataagtaaaccatgccggtaaacagaagagacgccagaaatttcgatgttaaaatccgccatcttcggttcgggcttgtagcgataaacttaatcgtcccaagggcaaactctttagaaacaaccccgctgacggttaaaatcgcggtcaagctgacgaaaatctcaagcccgtttgaagtaaccgtgccgaaaaacctccagccgttccattcataagggttgatgttatgctccaaataatagtctttattcttaacatcagcagaataataaacgcctgtcgtttcagcgggtttatcaatttcttcctgttttttttcggcgagaagccgttctttccaattgttatccgaggaagcatctaactcatgattcataataaggccggccagcaaaacgatgagaaacaggaaaaaaagagataaaagtgtgccttttttttgggttatttttatgaattcgttctgcgccagatgaaatatgctcataccgcgtcctcctgatctgtaatcatcatgtatttctcttccaatgacaaagttcttgcagaaacgcgggaaatcagaatctctttctctgccaaagatttaatgacatacgggatggtatcttcttccgcttccaattcaatgatgcggctgtctttttgctgtacttgaagaataccgtcctgctctaatatttctttcgcccttgccggatgatcgaccgtgacggtaaacagctttttctgaccaaggtcatgtctgttcttcatgtcttcaattcctaaaatccgtccctttttaatataggcaaccctatcgcaaatctcctccatttccgacaataaatggcttgataataaaatggaaaccccttgcttcgctaaatcggaaagaatggtgcgcaattctttcattcctttaggatcgaggccgttcatcggttcatccagaattaataatccgggattgtgaagaagagaataagcgagccccaagcgctgtttcatacctaatgagaaatgtttcacttttttgcgggcagcctgctctagcccgacttttgcaagggtattcataaggtcatccgttcgcagcgaggtgctgcgcagtttagtaaaatattttaggttttgcaaagcggtcatattcggatacatatccgggccttcaatgataaccccgatatgtctcataaaatattcaaagtcgctgtccggtctgcctctgaatgaaatggctccttctgtttttttaataagctgtacgatcattctgaaaatagtggtttttcctgagccgttcggccctaaaaggccgaaaatctcgccttttctcacatcgaaagaaattgactgtacaataggggtatgattgattgttttagagacatcttttaatatcagggctggttcagtcatgatatttgcacaccttccttatgatttagggtaaaagccgtcaaaaccgaagaacatgcttccgatcaggccggcaacgattaaaatgagagcaatgctataccacatttttcgattcaatggtttccctccttacaacgctgacattccatttgaaatagcgcaaaaagatgcggaatatcagtttcgaaagatcaaatccggccataaacaccgccatacccgctccaagaaccatacatccgttaaaaatggctgttacaatcggcacttttacgaggagaaagaatgatccggtcatcagcatcaggccgatcgccatcaaacttaacaccgcaacagaggcaaaaagaaacggtgtcagcataaacatgaagttgaacatgcccatccccagcatcaggccgaatgctttgaaaaaggagcgccatgttttctgctcctcggcatcactgatgaaaatatccgcttttaaggcgcgcgcaagtgttttggggtttcctaaattgtcggcgatttgttcatcgctttttccttcagcgccgcccatttggaatatttcgccgatatcggcgagtatctctttttgctcaagttccggcagatcttttatttcccgccggagatgttttaaatattggtctttacacattcattttccctccttaatgatgctgttcactttttcggacaggtcaagccattccgattttaatgtttgatgataaaaggcgccttcttctgttaccttgtaatatttgcgtgacgggccttgatcggaagctgctgtatacgtttttaaatagttgttttttgtaagtcttcgtaatatggggtagatggtgccctccgatacagggaacgtttcacttatgatcttgattaattcataaccatataaatcttcataaagaagcagggacaacacacaaagttccaacgctccttttcgtaattggctactcatttactatcattcccatcatatctaataattgtattctctatacagtgtattgcacagtagctaatcgatcaataattcccaagaaccatttgggatgaggaattgaatctttatgcttatgtgcgggcggggaccgagatgcgcagcccttgcgggaagaaggcctcctgaacaatgtttacattaatatagatcaggatgcgcgtcattgacaaatggcaaaaacccctttttccatgacaaggaaaggggtttttccgttattcggccattttttctaaattgccgttccggtccattttgaaggacggagaggcatgttcgtcgtcttcaaataaaactagttttctggctctgttcataattttcaccaaggtttcgtagtcttcctgaatggttttttgatctttttcaagcttttcgacggccgcttccagctgctcggttttagactgaagttcttggttttcccgttttaaacggtcattttccatttgcagggcggaagtttgctttccgttgccttcatagctcttcagaaattgaatgacgtctgccattgtgagctccgccttttggctcggctgctgaggcgccagcaaatgtgataaactagctaactcttccttgaagctttcatcgacataaggcatatgttcgccggacatgacggcttgccgatcctcttttggcgcttccgtttgaaccgtctcttcggctgcggtttcctgcatgatgtccgcatccggcgcaggcggctgatataatagtttcttcttggccggctggccgtttccgagcgcgcgcatccgctgtttccgctgttttttggcgagctgaagcgctttttcgtattgatggcggacgacggcattccatctgaaaccgcacgctgccgacgttctgtttaatttatcgcctacctcttcaaaggcgttcagctgcgtgcttccttcccggacgtgccggagcacggtttccgcaagcagcaggtcattttcctccgaccaggcgtcctgtctttgttttgtcaatgttctcaacccccaatatctttgatggtattagaatgtccagattggaaaatatttatacaaattggctgaaagaatgagagatacgcagagccttgcaggataagatgaatccttgtacaatgagatgtgatgtgatttttttcgtttttaaaattaagttttaacatagaggaacattgaatgaagggaagcgtacatcatggctaatgaattccgagtgtgtgatgattgccaggccaccaatattaagactttgctgccgcgtttgaaagaagctgacccggatgcaaaagtggaggtcggatgtcagtcatattgcgggcccggacgcaaaaaatcgtttgctttcgtaaacaaccgcccgctgtcggcgccgactgaggacgagctgattgagaaagtgaaaaagaagatcaaaaagtaaatgtgtatttttacgacagcctcgcccgatgggtcaggcttttttgcttcaaaaaatcaatgtcggaaaactggaacaaaacgccggacaaattcaaggatgttttcaaattacagagccgatataatagaatcacggctaaaaaaaagagggaatgacgatggcgtatccaaacggaaaattatcagaagaaaaagtgtttaaagatcccgttcaccgctatgttcatgtgcgggacaagctgatctgggatttgatcggcacccgtgaatttcagcggctgcgccggatcaaacagctcggtacgacgtatttgacgtttcacggcgcggaacacagccgttttaaccattctctcggcgtctatgagatagtcagacgaatggttgatgatgtttttaaagggcgtcctgaatgggatgacaatgaacgcgaactctgtctcagcgccgcgcttttgcacgatttgggacatgggccgttttcgcattcctttgaaaaggtttttcatctggatcatgaagactatacgagggaaatcattctcggcgacaccgaggtgaatcaggttctcagaaaggcgggaccgggatttccgcaggatgttgccgaagtcattgccaaaacatacaaaaacaaacaggtggtcagcttgatttcgagccagattgacgccgacaggatggattaccttcagcgggacgcatactatacgggcgtcagctacggacattttgatatggaacggattttaagggtgatgcgtccgcgagaggaccaaatcgtcattaagcaaagcggcatgcacgccgtcgaagactatattatgagccgctatcaaatgtactggcaggtgtattttcatcccgtgacgagaagcgctgaagtcatattgacgaaaattctccaccgtgcaaagcagctccatgaagaagggtatatcttcactcatgctcccgttcatttttattccatttttgaagggaagctgacgcttgcggattatctgaaacttgatgaagccatcattttatattatttccaggcttgggaagaagaagaggacccgattctgtccgacttgtgccgccgcttcattaaccgccagctgtttcaatatgccgaatttaaccccaatgaggaaatgtcggcttattttgaactgaccgctctgtttaaagaggcgggaattgatcccaattactatttagtggtcgattcttcatcggatctgccgtatgatttttaccggccgggtgaagaggaggagcgtctgccgattcacctgttaacgcagaagggccagatcaaagagctgtccaggcagtccgccattgtcgaatccatttcgggcaaacgccggacggaccataagctctactatccgatggacctcatttgcgacgattcagaaaaccctgaagcaaaattaaaaatccggcagctgctgggactgacatagaaggattttggtaaagaaggaaaaggagatgtcgggaatttgttgaaagaacatgcaaaactgatgaaggtgttctcggattctggagaaatcatcgggcggaaaaagctgcagaaaatcatttatatcgcgaagaaaatgcagtatcctttctacgaaaaatatgattttcatttttacggcccgtattccgaagaactgacgcttcgaattgaagagctgtgcaatcttgggtttctggatgaggtgaaggaaaaaaagggcggctactttcaataccggtactcgctgacggagacgggagccgagtttttacatcatgcggagcttacgatgccggatatgaagaagtacatcgacagcgtcaacagccgctcatcccggtttttggagctggtgtctacgattttgtattttgacggccttgaagctgaggaaaagaaagagaaagtgtttacgataaaaagcaaacagaaatatacggatgaagaatatgatgaggcgcttcactacatagaagagctgaaacacatttgttaaaggcgatggctttcgtcttttttgatgaaaaaaccaggccgcacataaagcgggcctggttttgtttattgtctcaatttgctgtgcttgtacgaatataaaaagtaaacgatcacgccgatgatcagccagacggcaaaataaagccacgttttcagcggcagattgaccattaaaaacaaacagcagataatggccaaaatcggcagtacgggtacaaaaggcactttaaatccccgtggcagatccttatgggtgcggcgcagaatcagcacggacagactgaccatggcgaatgtcaataatgcgccgatgtttgagagatctgacagctctttcagatcaacaaaacccgcgatgcaggcgctgatcagtccgatcagccacgtattaaagatcggcgctcccgatttctttccgacaatggtaaagactttcggcagcattccgtctcttgccatcgcaaaagatatacgggtcgccgcataggtatgggcgagaacgacggccatcagtccgatcaccgcaccggcagcgataacgcccgccaccgcgttttgtccgacagactgcagcacataagacatggcttccggcacattaagctgtgaatacggaaccatccccgtcatgacgagacagacgatgacgtataccaatgtacagatcaccagtgaaccgataataccgatcggcaggttgcgctgcggttttttgacttcttcagccgaagcggaaatcgcgtcaaatccgagaaacgcaaaaaagacggcagaagcccccgtaatgacgcctttgattccaaaaggcataaaaggatgccaattgcccggctttacaaaaaagcttcctgtgatgataaacagcaaaacaattccgatttttacgagaaccattatattattaaaggttttgctctctttggagccgcgtgacagaacgacggcaattaatagagtaatgatgatggcaggaaggttgacgatgcccccctggctcggcacgtgcagcagactgtccggcaaaggcatgccgatttcggctaacagattattaaaataacttgaccagccgcttgccaccgccgacgccgtcaccatataaacggataagagcgtccagcccattaaatggccgacaatttctcccatggtggtataagagtaaatataggcgcttccgtaaaccgggagaacagaagcgatttcggcgtaacataatgctgcaaggctgcagacaacggctgcaatgataaaagaaaagattacggaaggtccggcgtttttcgcggccgtaatgcctgtaagaaccatgacgcccgtcccgatgacggcgccgatgcccagtaaagttaaatcaaatccacccatcgttttggcagtctgcctgtttctgctttgttcaagcagctgggtgatgtcttttttttgtaggatattccgcaacacgcatccctccatccaaaagcaaaagccaagaggggctctttggcttttacccgtgtcacatcttctgtgtaatcgacaatcctgtgttctgtttccccgtctgttccgtttcttttccagtcatattgtctgccgcatccgatcagattatcctttccgtcaaacgcagtcacccttaatgattttacctgaatcatgtctataaaaccagcattgcataaaagggatgggtaaaaaagcaggagataatagtctgtatagggcaggataaaagttgcgggctttccggccgaaattttgactttccccgcgaggtatcagtaaaatgtaataaaaaacaatcaaatgatgatggatgcatcttgaaatggggagtttctgcatggagtacgatatattgcaagcaaatgtactggattacgcgctcacgaaatatttaaagagcacgaaaaagcttgatgaggcgacaattccgaagagtataaacaatatcagaggatttattctcaggattatttaccggcacggcacgtgcacgattaaagatatattgcaggaagttacattatcgccttcagccacgacaaccgctctgaatcatttagaaaaagagggtttcgtggaaaggtcgagaaataacgaagaccgacgcacggtatggatgacgctttccgaatcgggaaaaatggcggccatgcaaatgattgaaaaccggcagatgctcattgacgagctgttcgaagcattgacagaagaagaaaagaatacctttttcagcctcgttgaaaaagtaatgaaataagccggcctgacatagcagcgccggccattatcaaggattactccgtatcgctgatccgtttgccggcgacggcgtaatgatcctttctcatttcatcaatcatgacaatgatcttttcttcggctgcgcctgtcgtttcttttacggcttctgtcactttttcaaccagattccgtttttgttcatctgtgcggccttcaagcattttaacggttacgagcggcatggtgctgatcctcctttatcgtttcctctctttggaagagaggtcacttatagtatactgaatgaaggacaatcttgcattttttaaaaaaggggatttttacatttggacagatttttatattatccgctggagcttatgccctatgtcgtgattacgctgatcgtggcatttacgatgcatgaactggcgcacgcgtatgtcgcgtatcggttcggagacgataccgcggcgagacagggcagattaacgctcaatccgattaaacatcttgatgttttcggaacgattctaattttggtcgcgggtttcggctgggcccgtccggtgccggtgaaccgccgcgcctttaaaagaccgcggctggcgggagtgctggtttccgtcgccgggcctgtaagcaacctgcttcttgcctttatcggtttctttttgctagtgttgatgcatgcttacggaatggagctgctttctgcattcagcatggggcttgaccgctttttctctatttggattcagctgaatctcgcgctgtgtttattcaacctgctgccgcttcctccgcttgacggctaccggattattgaggatctcgtgccgccgcgggtgcgcgccaaaatgactcagtttgagagctacgggattatcgtgtttctcgtgctgtttgtgacaccggtcggctcctatgtcgtgtggccgctgttaagtgaggggagagactggattctcaaggtatttgccattatatttcaaccgcttttgtaggagggtattttcatggaagaaaaaaagaagaaaacaatcggatttaatattattaaaagtgatccgaccgacggacatggcggttttggcgccggggcgctgagccttgacaatatttctccggtatttgtcgatgtggaagagaaggaagccttcgttgacatcggcgccatgcatgcccgcagtgtcgttgaaaaaggcatcaaattcctgccgaacaaagatgaagtgccgaacggaaaaccgtactggctcgtgtgggtcaccatcgacagaaaagaagaaggcccttattacgcgggtgtgacggcttgtgaaatgaccgtggacagaagtatccgcagaggctataagtcattgccggagcatgtgaatttaatggataaatcaatgaagcgctgcattatcgtggacaaaatggacgccagctcaaagcaggtgcttgctgaatttctgcagaagcatgaccaagggctctgggaacgttcatccgatgaattgaaaacaggtctgcttccggaagaaaaataatttgtgaactttttgtgaactttataaatatttgcactattttgcgattgtactgagtaaactgttgatacagaatcaggacatggaaagtcccgagccgaaccaagactcggggtttttcatgtttacgcggaggtttcatcatgttcaccgtctttgaaatcgggccatgggtcattgaagcagatgcggcggaaacgagaaaacaatacgaaaaatcatggcctgatccttgcgattgcgggagctgccggaacttttccgaggcggtgaatctccttcccgccgagaaaacaagattgtttacgcagtttgggattcgtccggctgtctgtcacgacttgggggagcatggaaaggaaaacggcctgcatcattatgcgggcagctatccgattgtcggcaggcttagggaaggctggccgaagtttcatatcgagagggcgggagatatccgcttttcgttttcattgccgagtacaacattttttataccgaagggttttcctgaccctattatccatctcgacttttcactcttgctcccatgggtgcttgaggaagacgcggattaaaagcccggcgcgcaatgcaccgggctcagtcttttttgccgagccacttatcccaccactttttgcgcggagcttctttgcgggcgggggcgtgttccttttcttttttagaaggttccgatccgtagcacacatccgcgggctcagtgcctgcgatgaaatacgtataatgctttgcggcgcagccgggtcccgaagtgtagccggaagcgggatcgatatagacgcccgtgacgcccttcggcggtttaagcgctatttccggttctccttcgagcgccttctccataaagtccgcccaaatcgtcttcgcatagcttttttcttctactgaatcaatcgtgctgcttttgtcatagcctgtccatacaccggcggcaagagccgggttaaagccgatcatccagctgtctgcgctggtcgtgcctgatttaccgccataggttcgggtcagccggtcagaaatggtgcgtcccgtgacggaagtatagccgtttaaatcctgatcaaacatgcccgtcatcatgctcgccgtcacaaaagcggcttttttatcaagcgtctgctgatgtccgcgcggctgttcatacaagacgttgccggcggtatccgtcacttttgtgataaaggaaggggtgatttgttttcccccgtttgcgagcatcgcataggcattaaccatctcaatcgggcgcacgggttcagttccgagcgccagagacggaaggggctttaaatgttcgctgatgccgaattcctttgccgccgacacgagcttattcatgccgagaaagagatgagtcttcacggcataaatgttgtctgataacgcaagcgcctgaagcagcgtaatcggtttattggcatagtagccgttgtaattgcttggagaataagtatttccgttgtcgtcaatctggaactctgtggcttcgcttttcatcagcgtgaccggtgtaaagccgctttgaatcgctttgtagtacaaaagcggcttgatcgtggaagccggctgccgtttcgcctgtgtcgcccggtcaaacgggcttttttcgtagtcacgtccgccgagaagcgcaagcacgcgccctgttgccggatcaatcgcggaaaagccgacctgaatgtcagagccggtacggatcgtatgtgccacagtgttttccgcaatccgctgcatgcgcttatcaagcgtcgtataaacacgcaatccgctcgttgcgagctgttcgcgcgtcatgccgagctttttctcgagttctttcatcgcatcatcgtaaaaataaggcgccgttttcgccgcggttctgtttttcagcggctgataggcaagcggcgttttcttaagcctttccgccttttcttttgagatcattttttggccgatcatcagtcggagaatggtttcctggcgctgtttggccttcttttcgctgacatatggcgaatagccggacgggcctttcggtatgcccgccaagagcacggcttccgcatcgttcagatctttggcgtgtttgccaaaatacaggcgcgaggcggcttcaattccatatgcgccgtggccgtaatatatcgtatttacataaccttctaaaatctcgtttttagaatagttctgttcaaggcggatcgtgtaaaaggcttcattccatttacgtttccatgtcttatcatgctcaaggtagagatttctcgcgtattgctgggtgatggtgcttgcgccctgaaccttggccattgcctttatgtcagccagcgcggcggcggccatccgccggtaatcaaaaccgtggtgattgtaaaagttttgatcctccaccgcaatggcggcctgcaccgctatcggattgatatcttttaaccggacccagtagcgcttttccccgaaatcggtctcacctagctttgagccgtcatttgcataaagaatcgtagactgaggaacccggacggagggggccccctgccatttcgctgcaagaagaacggatgtgaagcagacgccggccagcattccgccgatcagtgtcagaaagatgcaggcgcggatgattttgaatgtgattctgagctgttttccagatactttatccacttttgggaaccccctttttcatgattctattattatgtgaaaaaagggggttttttaaacatatcaaaccggacacttctttactttttcccctccatcctctatactttttccttaggtgaaaatgagattttaaccggaataaaagcgatacagacgcttacaataaatgaaataagccttgaaagggagatgacaattgagcgagctttggtatacggagaagcagacgaagaatttcggcattacattaaaggtgaaacaaacattacatacggaacagacggaatttcagcatctggaaatggtggagacagaagaattcggcaacatgctgttcttagacggaatggtcatgacttctgaaaaagatgaattcgtctatcatgaaatggttgcgcacgtcccgttatttacgcacccgaatccggaaaacgtcctcgttgtcggcggcggagacggcggtgtcatcagagagattctgaagcacccaagcgtaaaaaaagcgacgcttgtcgacattgacggcaaggttattgaatactctaaaaaattccttccgtccattgcgggcaagcttgatgatccgcgcgtcgacgtgagagtcgatgacggtttcatgcacatcgcgaaatcagagaatgagtatgacgtcatcatggttgattcaacagaaccggtcggaccggccgtcaatctgttctcaaaaggcttctatgccggaatttccaaggcgttaaaagaagacggcatcttcgtcgcgcagacggacaacccgtggtttacaccggaactgattacaaacgttcagcgtgacgtgaaagaaatcttcccgatcacccgcctgtatacggctaatatcccgacgtacccgagcggcctgtggacatttacgatcggttctaaaaagtacgatccgcttgaagtggaggacagccgtttctttgacatcgacacgaaatattacacgaaagagcttcacaaagcggcatttgttcttccgaaatttgtgagcgacttaatcaaataaaaacgtacggcgcaggagcgaatcttgcgcttttttacaggaaagcgagggttttatcatgaggtttgatgaagcatattcaggaaaagtatttatcgcaagccgccccgactggaaagaggcggacgccatcctttacggcatgccgatggattggacggtcagctaccgtccgggttcacgattcggcccggggagaatccgcgaggtgtctatcggtctcgaagaatacagcccgtatctcgaccgtgacttagctgatttgaatttctttgacgccggcgacattccgcttccgttcggcaatccgcaaagaagccttgatatgattgaagaatacgtggacagcattttagaaaaaggaaagttcccgctcggcatgggaggggagcaccttgtatcatggcctgtcataaaagccatgtataagaaatttccggaccttgccatcattcattttgacgcgcacaccgaccttcgcacggattatgaaggcgaaccgctttcccactctactccgatccgcaaagcggccgagctcatcgggccgcaaaacgtattttcattcggcatccgctccggaatgaaggaagaatttgaatgggcgaaagaaaacggcatgcacatttctaagtttgaagtgcttgagccgctgaaaaaagtgctgccgcagcttgcgggacgccctgtttatgtcacgatcgatatcgacgttcttgatcccgctcatgcgccgggaacgggcacggttgacgcaggaggcatcacgtctaaagaattactcgcgtccatccatgaaatcgcgcgctcagaagtcaacgtaaaaggcgctgacctcgtagaagtcgcgccggtctatgaccactcagaacaaaccgcaaacacggcaagcaagatgattcgtgaaatgctgcttgggtttgtgaaataaaagaaaatcccccgcttgaaacatgcgggggatttttatattgtatataaactacttagaagttagtaaaagcaacatattattttaccattaatcattgatgttattgataaaaattatataatagggtattatttagtaaatacatctttagaaaggaagttagaatgaaaacagcagtagaaaatgaattggaattaaaaaagattgaaatttcagtaattaaactgataattgctgaaaaacctaataaagagatcgctaagtcattaaactactcgcagcgtaatgtcgaatatatcatagccggtctctgtaaaaagtggaatgtgagtactagagtcggtattgtttcggaagcatataaaaggaactgtatacagtgaacgaaatgaaagaaaaacccctattgagggggtttatttatatatgctaaaaaaacattctatacaggaatgccgtaaaaataaaaactgagattgtcaggtagttcaaatttgttctccatttcagaagaataaacaaaagaaataagtatgcaatattgaacaaatcaaagatagaaaaaatcaaatgattacttgtgaaaaataaactagtatttggatgttctgcgaaaatgtttttgaatgatataagaaaaaacttaattgcgaccgggatgttagaaaacataaatagggaataaaaggttttaatcttaatttgagcgccaagaaaatttataatgagaaataatacaaatccttcaaaaatcaccccgaacattaaaagaaacagtgcggctatcgcaatgatataatctaaatgtttcacttgctcaacaacttgtatagggatgtttttgggaattaaacttttcataaaaggcaatagagaacttaaataaaaagctaacccgataatataaaacaaaaacgaggacaaaaaattaatgtttcgttccttaaatgaggataattcaatttgcataatcttaagaggctccttttataaagataggtgtaataaatgtttctaacatagctgctatcattaaaccgagaaatataataccaatatatttaaaagtgaatttcaaatttattttgaggagtaataaatctaaagttaatttcattcctacagaggctgcaagaagcaataccggcacttcaattattccatggggaataacaagcagtaaaaggtttaaattgtctttgatgtttcctatcgcattccctaaaattaatccattaataattaaaacagcaaccgtgccaagtgacagcgtcaacggtcctaaaaaaacaagcagactcgctactttaatattattaaagaaaatctgaaaaaaatccggacggatatttcgatttagattatttacatttgaagcgggatctgtataaaaatatgctgtaaataaagcaattaaaaataagatcagacagagtatgtacaatttgactaaaacgttctttttaaacaaagtattttcatccattcgtttaagggactgccagggatattgaatttaatgttttatattaagctgctgctgtacttgctgcagccaattgttctaaaacggctaatggcaagcctgcaccaagagatcctaaaacagtaatgatagccaggactgaacccgttgcagtgatagcactgacaatccaactaggagctattattccagctctgtttaaaatatcgatgacatccatgcttaaatgattatgttttatactgaaaagagcgagaacaatgattcctgatgctactaatgtaaaaatcgctttactattttgtgtttttaaaagtagactcattttttcctccaattttttcaatatccccagcaagttaaataataaaatatattggaagctatttgaattgcggatttccgaaaaaatatttaagaggtgaaatccgttaaggtatctgctggcttatttcagtacaaagaaagccggaccatatgtatgatccggctttctttgtactgaaacatttatatttttttttcaagaataatatcaaaataatcggctgccccataacctgaaataggaggagcaaatatttgaaccagcttccatccttgctgcgaatacttttcaataatttctttatagtcttctttaggctttcctttccatcggtttacttctacttttatgaacttatattcgtacattgctgtataatcctccggaagtgtattggaattgttaccttgtttttcgattatgataaacttgaatccataaatagagcgcgcagcctattaaaagtattgggaattgccatcctgtatttccgtttttaaaataatctattaatgaccatatcagtaaagcgacagtataaaaactaaatgctattctggcggctatacccgattggtgtttttgcatctcatccattttcttcataagaaccgctcccttacttttttttggcgttatagttgaatactttatctattcccgtatttaatgcgtgagctatcgaaaaagccagacttaaagttggatcatatttattattttcaattgcattgatggtttgcctggtcacattgcagagcttagccagatcattttgtgaaatatcagctgctgttctaagttttttaatattgttatccactaaaaccctccttaaatatttttgtttttattttaaattttcaaatttatatatatttattttaaataatatatgtatatgtgtcaaatactttttacacatttgaattttaaggtatactttttgtttttgcaaattagttgtttatataaaaaacggcttgcagtttaacctgcaagcctaaaagtaatcatcatttaaatcattccgcgctgagcaacttcaaattgatgtttcggtgcacttgcgatttcggctgaaacaaaaacagtgcttattgccaagcaagtaagtgctaatttatacttcaatttcatacaacttcacacctccttgaatctgctgtcttgtttcttccacctttaaaaaatatgcggaagccttctcgaaattttctctttcatgataatattttgccacatctaaggaaaaatcttcaagatcagcatacatcgatttatctctgagaaagtcaaaacattccatgattgcttcttcatcaggctcaccgacatataaagattctaaaaattcatactcggcgatatatagggaatcttctgcctcctctgcataagatacccctttgtcatgatattgtctggctatggccatatttccgattttataatgtatttgtgtgattaagaaataggcttgcgggagagaagtgatgatgttcccatcttcaaaaacagctattgcccgttttatgtaatcaatggctggtttgtaattttcttggctgttaaaacaaagtccgatattatatagagtccggcccattaattgtggctgctgttctgcctctgccatggcataagcctttttaaaatgctgaattgcttcatcatattgctttaagtcaagaaagttggtagcgaacaatgaatggcactgaagcacccttatattatatgcctcctgcttatgataaattttataagcctgccgggcataatccatagaaaaataagtctgtttcatataatagtaggactctgacatcttaaaataaaattcagctttctcgatacaatctttgacaaaatcaagcttatattcagctttcttaaaaaactgaatcgctgaaagatattcacggcattccagctcatacatcccccggaaaaaattaaaataataatcaagacgtccggtcagccgggcctgctttttatcaatatccgcgagcagatccgatagtctaggctgttcttctatccgctgcgattccagcggttcgaggtattcgagcatcagattatggcggaattccatgagagaatagtatagatgaagatcctgatcatcttccagacctgcaagttcttctttgatttctctccgcaagtactcggcgtccgggatgctgaaccttcgaatgtacatataccattcgttgattttttctccaaccgctgaagatgataaaacactcgccactattccgaatccctcccttccacgttatgtatatgacatattttatcattttcattcggaaggatagcgcaaaaataccgcaatgttttctttcgttaaaaccgcatgtctgcggatatcatttcaaaaatccactattatccccacaatttgtacaagcaaacaaatacaccttcccatattctgttgtatctgcgtgagcagtgtatgtctgaaaaggaagtgaagatatgagaaataacaagctttcctttaaagaaaaagcaggagccgcacaagaagaatgtttatgtttttgcgaggaagaagcaagccgtgaagcgatgtttcaagcgccgattgaattgcctgaggggtttgtcgttgatccggctgaagctgttgcaggcgtgacgtggaatgcagacagcctttcttgtgtcattgaacgctgtttcattgagacggggccagagcctgatgaaatcggtgttcaattcgcagtgcgcctgcagggaactgttacgcttctcgtcagtgtctcaccagtgcgaaatcaatatggacaagggaacgggtctgtttctgtcatccgcaatgcagagattgaccaagtcgtctattattccgatgagcctgatgattgcccggatgtcagtgacattacgatcgagaaccttattgtcgttccgccattctatggcagtcctttatcggtgacgggcacgattgtgcttgtgcccgaaccgggacccgtttatgcgtttacagcgaatccaaacgatcaatcggtttctgtgatagatacaaacactcacaccgttgtgacaaaaattgctcttccgtaccggccgacaggtattgaaataactccggataaaagcgctgtgtttgttttgcacttcaacaataatgtgatttctgtcatcgattatgacactttaacagtgacagcatccatactgctggatcagccgcctggatcggtaaaatgcatcccaaatcatgagtttgcttatgttctcggcgatactgcgatttatgtgattggaattgatacgttaactgtggataggtcgattcctgtggaaggatttgattttgcaattgatcccaatgggttattcgcctatgttcttgattttggtttagtgcaaaaagtggacctattcaccggtgaagtcacaggaacgattgaacgagagcttatcgtatcatccatagaaacaaattggccggagcggtatgcgtatgtcttagaacaagaattcttattcaattatttgacggttattgacttaaatacgtttacgatcagcattacccaagagctggagcctgatggccaatatgtaatgtttacgagtggatcagaggtgtatttacatgacagcttcactggcaatttatatgctgtcagtccgaatggtgcaggcgttataggaaatgttccgcaatcggcaagagactttgcgtttactccgaatggcgaatttctgtatgctgctcattttttagagcagaacatcactgtttacaacacggatgattattctgtggaaactgtgatatctcttggggtttcaccgggagatattgtgatttaaccaactgcatgctgtacatttctaaaaggacgtgaattcatgaaaaagaatgatctgtctgctttacaggaaaattgtttctgtttttgtgatgaggaaattagcagagaagcgccgtttcaagtgccgattgacattcccgaggggttcaccattgattctgccgaagcagctgcgacggttacatggagtactgctcatttattatgtatcagtgagccttgcttaatccagactgggacggaaccagaagatatcggtattcgatatgccgtgagagtaaaagggaccgttacgcttcttgtcagtgtgtcgcctgtacgaaatcaatatggacaaggggacgggtctgtttctgtgattcatactgaagagattgatcaagttgtttattatgcagcgcagtctggccgctgtcctgatttcagtcaaataacggtggaagatcttctcattgtaccgcctttctacggcagtccgcttacggtgaccgggacacttgttttaccgccaccgccagaccctcaatcgtatgtgtttacagccaattcaggagacagcacggtttcggttattgattcagatttaaacactgttgtaaaaacaatccctttttctgacgtgccaactaatctaggcgttactttcgataaagctttcacgtatgtcctccatgggaataccaaccttgtctcagtgctagataataaaacattaaccatcataaataccatcactgttggaggagggccgagaaaggttgaatttgattcaacagatgagttcgcgtacgtgatggccgccggatctatatatatgatcaacatggcctctcaatcggtcattgatgtcattccgatacccggcgctttagactttgctcttgatccgaatggacagtatgtctataccgctaatggaagcagttggtcggttgataaatatgatgtaaatactgggcagttggtagaaagtatcatagatacatttgaatttcccagtttaattgccactccttacgctggaaattttgcgtatgtgttgaatggtgagctgctgccgaaaggggtaacggagatcagtttgtcaccattaagcaggggaggcgacttcaaccgtttatttgaaactctgaggacgattgtattttctcgcgatagcactagggcttattttctagagccatatagtgaaccgtttctcattaataacttatacgtagttaatacggctggacagaggatcattgcaaacgtgtctctgcccggcgcctttgacctcgccgtaacacctgataatcagtacatttatgcagcacagcccggcgacaataccgtaaccgtgtaccgcacgagtgattatacagccatgacggtgattccggttgggactggtccgtcagcgattgcgatgtagcttatttcacaggttgagagaagcagagctgcgataaaaaaatcgtttataaataaatgagccgatctgctggatggcagccaggatgattaaaaacagcagttcacttacagtgaaactgagcatccgccaaaccccggctcctgtcagcgctcccgcatgcccttttttgaacaggctgacatgctggaaaagctgcagcaagtacgtccgcataaaatacaataaatacaaaatcagtaacaccgcgagtcccattgatacggcaaggggcgtgtgaaagcggaaagggacggctttgacgatttcgaacacgcagccgaatatgatgacttggcataatacagcagccatcacgtgtgtttggcggacgtttttatagctgtcacgcagcgctttgacatcgttggcatttctgctgcacaatctatgttgccggaagtcgcagcagcttcgatgagactgtgtgagtttctgaaaagctgctgtcatgttttttacggattgggtgacatagtgatatgattttctcttctcataaggaactgctttttatgaggtttatcttcaaatctaatgagcaatgatggtaagatagaagcagttgaagtttacaagctgaatgattatactattcaagtcaaagtggaatgatgaaaaggacgtgtcaaaatgaagcaagagacaccgataacactccatgtgaagtctgtgatcgaggatgacggaaatgatgaagtcatcgaattccgtactaccggattttactatgtaaaacaacaaaaagtgtatctatcttattatgaagaacacgacctaggcaaagtaaaaacgattgtgaaggtgagcgaaggcgaagtcctgatcatgaggtcaggcgctgttaaaatgaatcagcgtttcataacgggagcttccacaattgcgaaatataaaatgtcatttggtgagcttgagctggaaacaagcacaaaatcgattcaatctgatctcggtgaagaaaaaggccgaatcagcatcgcatatgacatgcatgtcggagacgggcagcagcatttacataatatgacgatcacgtatgagggaggaactcacgcatgaacattgcggaacaaatgaaggacgtgctgaaggaagaaatcaaagcggccgttctgaaagcgggcctggcggacgaaagccagattccaagcgtactgttagaaacgccgaaagaaaaaacacacggtgattattccacaaacatggcgatgcagctggcgagaatcgcaaaaaaagcgccgcgccaaatcgctgaggagatcgtggcatcatttgataaaggcaaagcttccattgaaaagatggatattgcgggacccggctttatcaacttttacatgaacaacagctacttaacaaaactgattccgtccgtgcttgaagcgggtgaacattacggagagacaaacatcggacaaggcgaaaagattcaggtcgaattcgtatcagccaacccgacgggagatcttcacttaggccatgcgcgcggcgcggcggtaggtgacgcgctgtgcagcgtgctttctaaagcgggctatgatgtgagccgcgaatactatattaatgatgcgggcaaccagattaacaacctggcgctttccgttgaagtccgttattttgaagcgctcggtctcgagaaaccgatgccggaagacggctaccgcggcgaggatattatcgccatcgggaaaaagcttgccgaagatttcggcgaccgtttcgtacacgaagaggagagcgaacgtcaggcgtttttccgtgaatacggcttaaagtacgagcttgataaacttcgctccgatctggaaaatttccgcgtgccgtttgacgtatggtattctgaaacgtcactgtatgaaaacggaaaaattgatcaggcgcttgaggcgcttcgcgaaaagggccatgtatacgaagaggacggcgcgacatggttccgctccacaacgttcggcgacgataaagaccgtgtgctgatcaaaaaagacggctcatacacttatttgctgccggatatcgcataccataaagacaaacttgaccgcggattcgacaagctcatcaatgtatggggcgcggatcaccacgggtatattccgcgtatgaaagcggcgattgaagcgctcggttacaagaaaggcacattggaagttgagatcattcagctcgttcatttatacaaaaacggcgaaaaaatgaagatgagcaaacgtacggggaaagccgtaacgatgcgcgacttgattgaagaagtcggcttggatgccgtgcgttatttcttcgcgatgcgcagcgctgatacgcacatggattttgacttggatcttgccgtatccacatctaacgaaaaccctgtgtattatgcacaatacgcacatgcacgtatttgcagcatgcttcgccaaggggaggagcagggacttaaaccggcggcagatcttgatttcagccatattcaatcagaaaaagaatatgacctgctgaaaacgatcggcggcttccctgaggcagtggcagaagcggcggaaaaacgcattcctcaccgtgtcacaaactatatttatgatctggcttccgctctgcacagcttctacaatgcggagaaagtcatcgatccggaaaataaagagaagagccgcgcgcgtctcgctttaatgaaggcgacgcaaattacgctgaacaatgcgcttcagctgatcggcgtatccgctccggaaaaaatgtaatgatgatcaaaggacaaagtcttcgggctttgttctttttttgtatataaagcgtgtgatgtaattcacaatcccgcacactgagtttttgtatgataagactgatattgaatcagtgaaaggggcaagccgaatgatcaatcgtcaacatattcaattatcgttgcagtcattaagcttagtggcagggtttatggtgtgggtgctgatttcatcgctcatttctcaaatgacatcagatattcatttaagcaaaggcgaaatttcattggtgacggcgattcccgttattctcggatcgcttctccgtattcctttaggatatttaacgaacaggtatggggcgcggctgatgtttatgatcagcttcatcctgcttttgtttcctgtattttggatcagtatcgcggattctttatttgatttaatcgcgggcggctttttcttagggatcgggggagcggtattctccatcggagtgacgtccctcccgaaatattatccgaaagaaaagcacggtgtcgtcaatgggatttacggtgccggaaacatcgggaccgccgttactacctttgcggcgccggttatcgctcaagccgcgggatggaaagcaaccgtgcagatgtatcttgttttgctggctgtcttcgcattactgcacgttttgttcggcgaccggcatgagaagaaagtcaaaatttccataaagacacaaatgaaagccgtttaccgaaatcatgtgctgtggatgttgagcctgttttattttattacgttcggcgcctttgtcgcctttaccatctatcttccgaattttttggttgagcattttgggctgagccctgcggacgccggtctgcggacggccggctttattgcggtctctacgctgctcaggcctgtgggagggtttcttgcagataaactgagcccgctccgcattctgatgttcgttttcgcagggcttacgctgtcaggggtcatgctgtcattctccccgacgatcggcctttatgcgttcggatcgctgacggtggcagtctgctcagggattggaaacgggacggtatttaaactggtgcctttctatttttcgaagcaagcggggattgccaacgggattgtgtctgccatgggcggactgggcggttttttccctccgctgattctggcaagtgtatttcaggcaacaggccaatacgcgatcgggtttatggcgctttcagaggtcgcgttagccagctttgttcttgtgatctggatgtattggcaggaaagaatgaaaacacatacggagagaaacagtcagagcctcaattcataatgatccattcacaagattgttagttttttctgggtgagtgcaaatcaagtcacgttacaatatacatacgcaacgtgactttcttcgaggtgagctcatgaatattctctctgtccgaaaatctgataaagaacttctttcccgcgaactgcatgaattgctggaatcgatcagtacgaaaaggaaaatgaaaaaacatacttatttgtttcaagaaggaatggatgcaaaagagctttatctgattcagtcaggactcattgaaatcggcaagctgacgtctgacggaaaagacctgacgcttagaatctgccaaaaaaacgatattgtcggggaattgacgctattcacagatgagccgagatatatgctcagtgcgaaagtgttagaggatggcgaggtgctcgtcattaataaaaacaagctggaaaaggaattgatccaaaacggtgttttgacgtttgaatttatgaaatggatgagcacccatcttcgaaaaatccagtccaagatcagggacctgcttcttcacggcaaaaagggggcactctattccacccttatccgcttatcaaacagctacggggtggaacgaagtgacgggattctgattaacattgtgctgacaaatcaggatttggctaagttttgcgcggcggcaagggagagcgtcaaccgcatgctgggagacctccgcaaacaaggggttatttcgatagacgaaaccggaaaaattattttgcacaagcgggactatttacgatgcgagatcgagtgtgaaaattgtccgctggagatctgcaatattgactgaaaaaaacaagggcagccggtgtccttgtttttcagcttgtgatacatatacacatgacggcgaaaaagaagccggcatttacgatttccagaatgccgatcgttttcaccggccagtctcttccgtgaaaaaaccaggcccgcagactgcttgggataaaagagagaaacgcccagcctgccccgagaagagccgataaaaaggggagcaagaggtgatatccccacgaccagtatgcaaaggttctgctttttctctcccgtatgaccgatttcacataaaaagaactcccgacaaaaaataaagcagattgcaagaatagaaaccaagcccagccgtcaagggttcccgttcccagccagcagctcgcaagcccgcctgaacaaaagaacagaacacccgcaatatcattcgtgagcgcccgttcgttttttcggcgggcataatgcgtatgtatgagaaacagcggcaataaaaaaacgccgatccagacgagctgcggcttatgatagacagaaatgatcaaaaagcagcaggccggaaaaccgtaataccatatccacttttgatagggctgaagctgtttttttttcaaagcgagcgaaacgggataaaccgctaagtaaaggaacagccagcccagaaagagcggaatatgccagaaaaccgggcctcccttgaccatgccgagtaaaaatggaatcagcagcatcgcccatgcgccgtgctgcttcggaatcatcgccttcatcgaaaccctcctttttatttcattataagtacaaacactctcctgataagtgacttttatcatacaagctgtgaaatacatcactgccgcgcgggctcaatcgggctacactaaagctatccttagcacaggaggctttcctatgaatcagtgtgactatttattatttctgaaacaacttcctatgtttaatgaagtgcctctgtccattgtcgaaaccttgctgaaaaacgggacgtttatccgcggctcatctgaccaatctccatcctttcttcattcacaatccgtttatattgtattaaaaggcaatatccgttttacggacagcaggctccctgaagggtcgcaaaccgttgcgctgtgggaaaaaggcgatgtgtttccgattgatgaaaaaggcgggctctctttatcgccttttatctcagtcaatgcctcaccggatattctggtactccatattccatattccgtatttaagcaaatgatgtcttaccatccgcggctgcaaatgaactttttggcgatgcttcagcaaaatgtcttctgttcctatcagttgtttttgcggtatctgcatacatcacgggatgaaaacgccgaacccggttcttaaacagaaccggttttttttgatgacgccgggcgtccccatatcgtttgaaaatccttcctgctgctctgtgtgaacgttttgtgaaaaaagcagagtgtgtgacatagttcacaaggtgatgcgacgtctctgtttatagtgtacatagcatcacctgactcggaaggagtgaacgatcatgaagaaaaagaaaatgagtccgttgctcaggagattaaactatttttctcctatcgaacatcattcaaataaccatagccaaacgacaagcgaagatcgtgattgggagaatgtatacagaaacagatggcagtacgacaaagtcgttcgctccacccacggcgtcaactgcacgggttcttgcagctggaatatttatgtgaaaaacggaattgtcacgtgggaaggacaaaacttgaattatccatcaacaggcccggatatgcctgatttcgaaccgagaggctgtccgcggggggccagtttttcttggtacatctacagcccgctccgtgtgaaatatccatatgtgcgcggtgtgctgatcaatttgtggcgggaagcattgcaggcgcatcataatccgctggatgcctggaaatcgatcgtcgaaaaccctgaaaaagcgaagtcctataaacaggcaagggggaaaggcggctttgtccgcgcggaatggccggaggtgctgaagctgatttcagcctctctgctgtatacagtgatgaaatacgggcctgaccggaatgtcggtttttctccgatcccggcgatgtccatgatcagccacgcatcaggttcgcgattcatgtcgttaatcggcggcccaatgctcagtttctatgactggtatgcggatcttccgccggcgtccccgcaaatttggggcgaccagacggacgttccggagagcagtgattggtacaattcaggctatattatcacatggggctccaacgttccgttaacgagaacgcctgatgcgcattttctggcggaagcccgctataaaggcgctaaagtcatttcgatcagtcccgattttgcggaatcctcaaagttcgcagatgactggctgagtatccgccaggggactgacggggcgcttgcgatggcgatgggtcacgtcattttgcaggaattttacgtgaaccaagaaactgaacgttttattgagtacgcgaagcaatacaccgattttccattcttcgtcactctgtcaaaagagaacggcgtgtatacagcaggacggtttctgcatgcaaaagacatcgggcggcagacaaaaaatgatcagtggaagccggcggtctggaatgaacagacaggtgcgtttgccataccgcaaggcacaatgggctcccgctgggacgggcagcagaaatggaatctgcacatgatcgacgaagacaccggggaacagattgagccccgtctctccgtgctcggaatagaggacgaaatcggctcagtgcgcattccgtatttttcagatgacggaaacaaagtgcttgagcgggatcttcctattaaaaaactggacctgaacggtgaagagacgtacgtcacgaccgtgtttgacttgatattggccaactacggcgtgaaccggggcatcggcggacaatcagccgcatcctatgatgatccccgtccgttcacacctgcctggcaggaacggatcacgggaattaaaagagaagccgttatacagattgccagggagtttgcccaaaatgcgattgatacagacggcagatccatgattatcgtaggggcgggaatcaaccactggttcaactccgacacaatttaccgtgcggtgttaaatcttgttttactcgtaggcgcccaaggcgtaaacggcggaggctgggcccattacgtggggcaggaaaagctccgtccggctgaagggtggcagacgattgcaaccgcaaaggactgggaaggcgtgcctaaacttcaaaacggcacctcgtttttctactttgcgacagaccagtggcgttatgaagaccagccgatcagtgacttggcttcaccgatcaccgcgtcatcccgctacaggcatcacgccgattacaatgtgctggcggcgcgattagggtggcttccgtcttacccgacattcaatcaaaacggcattgatctgtacaaagaagctgagaaagcgggggcggcgacacctgaagacgtaggtgcgtacgtggcctcacggcttcaagagaaaaaactgaaattggcgattgaagaccctgacaatgaagtgaatttcccaaggaatctcttcgtatggcgggcaaatctgatctcaagctcagggaaagggcatgaatattttctcaagcatctgctggggacgacgaacggtctgatgaatgacgacagcgacagcatccgccctgaagaaatcaaatggcgggagcaggcgccggaaggcaagctcgacttgttaatcaatcttgattttcgaatggcgggtacggcgctgtattccgatatcgtgctgccggcggctacatggtatgaaaaacacgatctcagcagtacggatatgcatccgtttattcatccatttgctccggccatctcggcgccgtgggaatcgaagtcagactgggatatttttaaggcgctgtcaaaagccgtttccgatctggcggaagaagtcgatatggagccggtaaaagaggtagtcgcaacgccgcttctccacgacacgatgcaggaattggcccagccattcggcaaaatcaatgactggagcaaaggcgaatgtgaagccattccgggaaaaacgatgccgaacatccatgtcgttgaacgggattacaaacacatttttcataaaatgaccgcgctcggccctcatacggctttaaaaccgagcggaacaaaagggatgagctggtcgattgcggatgaatatgaatcactcaaacagagactgggagaaaccgattcaaacagcgttgccaaaggatgcccgaatataagtgaagcgaagcaggcggcggaagcgattttaaccctgtcgtccacctcaaatggaaaagtcgccgtgaaagcatgggaatcacttgaaaacattaccaatctggagctgaaagacctggcggaagagcgcgaggaagaatgctttacgttcgagcaaattacagcccagccgaaaacggtcatcacctctccggcctttaccggttcagaaaaaggagggcgcaggtactcgccgtttacgacgaatgtggaaaaattaattccgtggcggacgctgacaggcagacaatcctattatgtcgatcatgaactgatgatggaattcggtgaaacgatggcgacatttaaaccgatcctccagcaccgtccgttcctaagcaagcggcctgatcaagagggcaaagaaatcgttcttaattatttgacgccgcataataaatggtccgtccacagcatgtattttgattctctgccgatgctgacgctgttccgcggcgggccgaccgtgtggatgaataaagatgacgcagaggacacggatatcaaagacaacgattggattgaatgcttcaaccgaaacggcgttgtcgtcgcgagagcggttttgtctcaccggattcctaaaggaatggcgtttatgcaccatgcccaggaccgccacatcaatgtgcccggcacaaaactgacgaataaccgcggaggcacccataacagcccgacaaggattcacgtcaagccgacccagatgatcgggggctatgcccagctcagttacggctttaactattacggtccgacggggaatcagcgcgatctgaatgtcgtcatccgcaagctgaaggaggtcgattggcttgaagattaaagcgcagatcgggatggtcatgaatttggataaatgcatcggctgccacacgtgcagcgtcacctgcaaaaacacgtggacaaaccgttccggtgcggaatatatgtattttaataatgtagaaacaaagcccggcatcggctacccgaagcaatgggaggaccaggacaaatataaaggcggctggacgttgaaaaaaggaaagcttgaactgaaatcaggcccgaaaacaaaccggcttgcaggccttttctataatccgaatcagccgacgattgatgactactatgaaccttggaactatgattatgaaacattaacaaacagcccgcaaaaaaagcaccagccggtggcgcggccgaaatcgtccttaacgggggattttatgaatatcgaatggggtccgaactgggaagatgatctcgcgggcggccatattacagggcttgaagatccaaacgtgcaaaaaatggaggaatcgatcaaaacagaattcgatgaagtctttatgatgtatcttccgcgtatttgtgagcactgcattaatccggcgtgcgtgtcctcctgcccgtccggcgccatgtacaaacgcgaggaagacggcattgtgcttgtggatcaaaatgcatgccgttcatggagatattgcgtctcatcctgtccttataaaaaagtctattttaactggcagacgaacaaagcggaaaaatgcacactctgcttcccgcgattggaggcagggctgccgaccatctgctccgaaacgtgtgtgggcagaatccgctatctcggcgtcatgctgtatgatgcggacaaagtggaggaagcggcctctgttgaaaatgaaaaggatctctaccattcccaactggacgtttttcttgatccgaatgatcctgagattgccaaactggcaaaagaacaaggcatcccggctgaatggatagaagcggcgcagcaatcgccgatctataaaatgatcattgactggaagattgcgcttccgcttcaccctgagtaccgtacgctgccgatggtttggtacattccgccgctcagcccgattatgaatctctttgaaggaaaaggcagccggcaaacggcggaagcgatttttccggctatcgaccaaatgagaattccgattgactatttggcgcagctgttaacggcgggggatacggatcatattcggtccacgttaaagaaaatgtctgtcatgcgccagtatatgagggcggttcagacaaataaatccatcgacccggcattggtctccagtgtcggcttaacagaacagcaaattgaagacatgtatcggctgctggcaatcgccaaatatgatgaccgttttgtgatcccgagcagccatcgagaagaagtgtcagatttatatgctgaacaagggagctgcggcttatcattttcaggcggccccggctcctgtttctaatttttcataaatgaggtgtaataacatgaacaccacagaccggcaaatgacgttctccgctctttccgttcttctctcttatccggatgaagagtggagagccgagattcccgattggaaggctcttatccatgacatcaccaatcagcaaatccgggagaaattgctgcactttttagaggcggcagccggcttttctccgcaagcgctgattgaacactatgtgtatacgttcgatttcggaaaaaaaacgaatatgtacgtcacctactttaactcaggcgaacaaagggagcgcggcattgaattgctgcatttaaaaaacacctaccagcaatccggtttcctgccgacagagaaagaactgcctgattacctgccgctgatgctggaattcgccgcggttgcggagattgaagcggcgagaagcgtgtttgagaaatacgtgtctaatgtgagggagctggcttcccgcctcgaaaaaaataacagcatctatgctgagctgctgcacgtgctgcaggccgcactggaaaacatcggtgtacatgaaagcattgaagaaggggctgttcaggcatgagcgggcagatcctgtggggcgttatgccatacattgtattgacgatctttatcggcgggcatatttaccgctatcagcatgaccaattcggctggacggcgaaatcaagcgagctgttagaaaagaaaaaacttgccgctggcagcacactttttcattggggactgctgtgcgttgtcggcggacatgtcatgggaattctgatcccggaaggcgtgtatgcttcccttggcatttcagagcatatgtatcacaaaatggcgatcggcgcaggcctgccggcggggattgctgcatgtgccggacttgtcatcctgacatacagaaggctgtttgacaaaagaatccgcaaaaccagctcgccatcggatatcttgacgcttattctgctgctgttcatgatgctgtcgggcgttgcggccacgtttctcaacatcgattcgaaaggatttgattacagggcaacagtcgggccgtggttcagggaaattgttttgttccggcctgacgcttctttgatggagagtgtcccgctatggtttaagtttcatatcatcatagggtacgccgtttttatcctttggccgtttacaagattggttcacgtgttcagcctgcccctcaagtatttgacccgcagctatgttgtctatcggaaacgcacgtaaaaatcccccctgcaagagggggattttttatggtgaaaaaataaaaacataagatattttctgccaaggtaatggctgggcggcggggattcctgttatgttttatttggaaataacatcaacaaaaggagagtgaagaatgaagcggattttcctcattttagccgcctgtctgatgacaagcgccggcgtcctgacactcagacattctcatgtattaaccggcggcacagcgggactgtcactaagcctgtcatacttgtttcattcctcttttgcgattatcttctttctgatcaatatcccgttttatatattttctctcatcagaatgggaatcaaattcactctatccaccgtttttgcagtcacagtactgactctgtttaccggcgcggatcactggctgccgccggtctctgtttcaccgcttgccggggcgatttgcggcggggcgctgatcgggttcggcctgtcgctcatgttttatcatcaggcatcgctcggcggcgccaatatcctcgctttatttctgcaaaagcgctgcggatggaatccgggtgccgttaatttcctcttcgattttggcgtcgtgctggccggcattttttccgtcgggttgctgaaagggctcttctccttagtgtcgatagcggtcaccggtctgatcatcggcatcttcaaaaataaaatcaaaggcagctgctcgctcaatccggcattgcttcagaacatcacacccggccaatcacaagaagcttcatcataagcctttccgctcgtgcggagaggctttttcatatgtttacaggcctgaaaacagagggtatacagagatatcggatcagatgggagagagtcgggatgctgaaaaggagactggaattttgctttttatatatgatgcttatcggagtatatgtcatatggttttttccggtttccaggcttgagttttacggaggggtgctttgttatgcaagcattattttgttcagcatctattcgttaattcttgaaaaccgcacctcgcagcacacgctgttatggattcatattcttgtgttttttccgatcgccgggtacttattttaccttttttccggccagctttatgaaaaaggcaagctgttcaggtcgaaacggacatacaaccgggaaaagctgagaacgatatttgatatggaacaaactcccgacctgtccgggctgaaaggaaatcagaagcgtttctttcaatattcaatcaaggcgtcccatatgaatattaatacaaaaagcaggctgaaggtgctcaaaaacggggacgaaacatttccggagctgtttgaggcgctccgggaggccgcgtcatttatacatattgagtattacatgttcaaatcagacatgctcgggcacaagatgatggacattatgatggaaaaggcgcgtcaaggcgtggaagtgcggtttttgttcgacgcggccggcagcctgaagctggccggaaaagatattaaaaaactgaaacgcgcgggtgtgaacatcgtcccgtttctgccgctgaaatacggttttttcaaccaaaaattcaatttcagaaatcaccgcaagatcgtcatcgttgacgggaaagtcggttttgtcggcgggctgaatgtcggcaaggagtatatcggcaaagaccaagatgtcggcttttggcgggacacccatatgaaagtcgaaggagaaatcgttcagacgctccacagcatttttatgcttgattgggaatacgtttcggatgaggtgctgattgatcagaaagcatatacccgcccggttgcggcagaaagcggcggcgtctatcaagtcgttccgacaggccccgatatgaaggagcggatgagcgatctgtattatgccatgatagcggcggccgaatcgtctgtatggatcgcgacgccttatttcgtgccgaatgagccgatccgcacagcgctaaaggaggctgctgccagaggcgtccgggtgcgtgtcatggtgccggaaaccaatgacggatttttaacccagtacgcgacgagatcgtatttccccgagcttcttcgcgaaggaatcgaagtctattcttatcaaaaaggctttatgcatcaaaaggtgctcatcactgacggaaacctcgcctctgtcgggacggcgaatatggacatgagaagctttcagctgaactttgaagtcaatgtcttttttacagatcaagaggcgatcaaagatcttgaagcgcattatctggaggatatgaaggagtctgaaaaaatcagccccgtccgtttctataagcgcacattatgggaaagaacgaaggaatccttcgcacggttattttccggcgttttataaaaaacgcttttaaaactccttgtgtatagtataattgagaaatattatcattaagaacgaggcacaaggaggacggaatcgtgctgcgacaatttttttcttattataaaccgtacaaaaagctgttttttctcgacttcttttctgccatcgccggcggattgatggagctgagttttcctctgattgtcaattactttatcgatacattgcttccggggcgggattggagtctgattattttgacttccgctgctttattcggggtctacgccctcagctcggcacttcagtatgttgtgacgtattggggccatatgctcggcattaacattgaaaccgatatgcggaaaaagcttttcgaccatctgcaaaagcttccgttcaaattttacgataacaacaaaacgggcagtttaatgtccaagctcaccaatgatttgatgtatatcggagaaaccgcccaccacggacctgaagacctgtttatcgcgatcatgacgattttgggcgcattcggtgtgatgctgtttattaactggcagctcgcgctgttgacttttatcattatgccggtcgtcatatggcttgctttgtatttcaataaaaaaatgacctctgcgtttacaaaactgaacaaagacgtcggagacttcagcgcgagggttgaaaacaatatcggcggcatccgtcttgttcaggctttcagcaatgaagcgtttgaaacgcagcggtttgacgtgaacaatcagcgtttccgcaaaacaaagctgacgtcttataaaatcatggcgaaaaacggctcgatcagttacatgctgacaagattcgtcacgctgttcgtcttattgtgcggcacatggttcgtgatccgcggatcgttatcttacggggaattcgtcgcttttgtgctgctgacgaacgttctgttccgtccgattgataaaatcaacgcgattattgagatgtatccgagaggcattgccggttttaaaagctttatagaaatactggaaacggagcctgatatcaaggacgccccgaacgcgagacatgtgtccggtttaaaagggaatatccgttatgatggtgtgtcgttcggttacgaagaaaacagtccggttctgtcgggaatcaatttgtccattcatgccggggagacagtcgcattcgtcgggccttcgggagcgggaaaatcaacgctgacaagtctgctgccgcgcttttatgagccgtctgaaggcgtgatttccatcgacggaatcgatattaaggacatgacgctgtcatcattgcgcggacaaatcggcgtcgtccagcaggatgtctttctgttttccggcacattgcgggaaaacattgcttacgggcggctcgacgcgtctgaggaagaaatctggcaggccgtccgccaggcgcatttagaggacttggtaaacgggtatcccgacggtttaaacacggtgatcggcgagcgcggcgtgaaactgtcaggcgggcagaagcagcggctttccatcgccagaatgtttttgaaaaacccgtcgatcttaattttagacgaggctacatcagccctcgatacagaaacggaagccgccattcaaaaatcgctgcaagagctgtctgaaggacgcacgacgcttgtgatcgcccatcggctggctacgattaaggatgcggacaggatcgtcgtcgtcacgaaagaaggcatcgctgaacaaggtcatcataaggaactgctggcatccggcggcatgtaccagagacttcatcaggcccaattcggcgagctgattcattaataaaagaaaaaggatagacgagcgggggccgggcagcctcctgtctatcctttttttatgtagtccgtatttaatgggcttctttttgcgcaggttcgatgatatgtttgaaacggtcaataagctgcaccgctttctttccttccactacaattaaatattcttgttctttatgggccattctgaacgtttccagctcaatgatatctttgatcttgcacattgtttttttagagtagatatacagctcgtggccccccgtgtggcaaagctgataaagctgaagcatgtttcttaaagtgaacttcttagcggctattttcaaagatgtaatgtttttcatatgttttctcctccgtctgatggtctgttatttcggaaattccccatataaacgggtgataaacctggttatgccttccacctcagcactccgcccgccaggcgtttgactccccggatggcgcttaattcttcgacgagccggagcagcgcccggtctttctctttcgcctcaatcataaaatcgatgtccgtatcccattgtcgaaaccgctccagcaccggcagaataaaattcgcatccacatagtccgcatgactgcgtatggctgattctgattttggcgaggagagatggaccttcggctttaagccgatccgctgccatgttttgatcatccgcggaagaatgtcatctaaatcagcgtcatcggtcggattggcgtaaaaatggtgataatcaaacacaaacggaatgccttcttgttcacatacactgagtgtttcctcggacgtatacgttttatcatcgttttctaaagtcatccgctgtttgatgacatcgggaagttctttcagattcacgcggaaacggccaagcgcgctttgtttgtcaccgtaagcgcctccgacatggatgttgatgacggaacggtccgcgatgcccattgcgtccagcatgtcataatgataggccatatccttgaccgcatttgcggtaatctcctgtttcgggcttgtaaaaagcgtgaattggttcggatgaaagctcgttctgagatcatattttctgaccagcccgccgatctcacgaaactcctggcgaaacggcgtgacaaaatcccacagcacatccggatgggtggcgagcggcacaatcgagcttgagaacctgtacagcgggatgccgtggctgatcacatagtggatggtgcgcagcgtattggtaagatttgcttttgtcacagaaagcagggcgtctttccgctcactgcgggaaagcttggtatagcgcgcatatgttaaggtttttgcgggggacgcgtcccaaaggcgcatggcgtttgcgacgaatccgaatctgaacagcatatggtttctcctttataaaaagtaagatatggcctttcccagccattctgcaggaagctgtctgacggagcgctgtttcactttttctaatgtgagaagctcggatttttcgatgtcctgctttatggttgaaagcacttcctttgtaaaggcttcatcatgaatgatgacattcacctcttcattccagaacagactccgtttatcaaaattcggcgtgccgataatgctgatgcggtcatcaataatgaaagctttgacatgataaaagccttgataataccgatagatgaggcagccggccttcagaagctcgggataataggtaaaagctgtttcccgaacgagcgggtggtctgacttcatcggcacgatcaagatgactttgacgccttttcggcaggctgaaataagcgcttcctgaagctttttgctcggtacataataaggcgtgccgataatgatttttttctccgccttacggatgcagttttcataatgcgattcaagcgaaaaaccgtcagacgcatatgtcctatgagagatattcccttcggataatgccggataaaccccgggtgatccgggtgcttttccggtgtttcgtttcagatcgcttacaaaaagagtctgaagatcggccgtgccttcgccggtcatccgcaggtgataatcctcccagtttccgaacttcgcttttttgccgaggtactcttcagcgatattaaaaccgccgacatagccgattttgccgtcaatgacggtcactttccggtgattccgtttttgcagcctgaaaaaaagaaacggaaatgccggtttatttagaaaatgaacgtgaacgccggcttttttcatcgtttgaatggaaggctttttcacttggcggctgcccgcccaatcgagcagcagatatacggagacgccggcctgggccttttccttcaataaatgaaacatctcatggctgacttggtcgttcttcataataaaaaacatcatatgaatagaagagacagcttggcggatatcagccgtcatctgccgcacaagctcgctgccgcagtgaatgagtgtgatatcactctttttcgggtcaaaaacgggctcatacgcctgttttttgtacgccgcccggccaagcagaatatcaagcagcataagtgcgatcaatatgataaaaatgacaagcaacacaaaaatgaccttcataccgacgctcctttccgaagtattcgtagtgtgccctgagaatgtgaatttaattattgactgaacactcattcattatttatgataaagtaaagatatgacaatgaagaggggtatcagaacaaagggggagacaagatgaacgcatttctcatggtaaacgcgctgctgttttcagctgtaaccgcttacgccgtttatttattcgtttacctgatcagaacgaggatcgcttatattaagctcggccaaagggaagaatttgataaacgcctgaaagaacgtcttcagaagatatgggtgaatgtgttcggacaaaaaaaactgctgaaagataaaaagagcggcatcatccacgttctgtttttttacggttttatactcgttcagttcggcgcaattgattttattctgaaagggctgcttcctgaccgtcatctgccgttcggtccgctttatccggcgtttaccttttttcaggaaatcgtcacgtttctgattttaatcgccgtagtctgggcgttttaccggcgctacattgaaaaactcgtcagactgaaacgcgggtttaaagcggggcttgtcctgctgtttatcggcggactgatggtgacggtgcttctcgggaacgccatgaaccttttatggcacgatcattctctgtcttggacggagccgatcgcttcctctattgcgtttgtgctcggcggtctttcagcgccggcggcagccgccgtgttttatgtttcatggtggcttcatctgttgtttttgctcagctttttagtgtacgtgccgcaatcaaagcatgcgcacttaattgcgggtccggcgaatgtgttcctcagcaggctggattcaaaaggaaagctggaaaaaatcgatttcaccgatgagacgaaagaaagctacggcgtcggaaagattgaagacttccgccgctctcagcttgtcgacctttacgcctgcgtcgaatgcggccgctgtacaaatatgtgtccggcctccggtacgggcaagatgctctcgccgatggacctcattttaaagctcagagaccatttgacggaaaaaggcgctgccgtgacgtcaaaatctccgtgggtgcccgcgcccgtttttcagcacacgaaagcgaatcagctcgccgcggcttcctcagggggaggatcgcgtgaagcggccgcagccattgattacaacccgagcttaatcggcgaggtcatcacggaagaggagatttgggcgtgcaccacttgccgcaactgtgaggatcaatgtccggtcatgaatgaacacgttgataaaattatcgatcttcgccgttatcttgtgcttacggaagggaagatggacagcgacgcgcagcgggccatgacaagcattgaaagacagggaaacccgtggggcttaaaccggaaagagcgggagaactggcgggagcaggctgatacagaaattccgacagtgaaagaaatgaaaaaacaagacaaagagttcgactatttgttttgggtcggatcaatgggttcctacgataacaggagccaaaagattgccgtctcatttgcaaagctgcttaatgaagcgggcgtatcctttgcgattctcggcaataaggaaaaaaactcaggcgatacgccgcgccgtttgggcaacgagtttctgttccaagagctggcggaacacaacatcggcgaatttgaaaaacacgggatcaaaaaaatcgtcacgattgatccgcacgcttataatatgttcaaaaatgaatatcctgatttcggattccgggccgaagtctatcatcatactgaattattagccgagcttgtgtcacagggaagactaaaaccgcttcacccggtgaatgaaacgattaccttccatgactcgtgctatttaggaagatacaatgaagtgtatgagccgccgagagcgatcttaaaagccattccgggcgttcaattgaaggaaatggagcgcagccgcgaaaacgggatgtgctgcggcgccgggggagggctcatgtggatggaagaagaaacgggagcgagaatcaacacggcccggactgagcaggcgctttctgtcagtccgacggtcatcagctccggctgtccttactgtctgaccatgctcggtgacggtacgaaagcgaaagaagccgaagacgcgatcggcacttatgatgtcagtgaattgctcgccatgtctgtattcggcgccgaaaaacaagagtctttatagaaagaagcgggccgccggcgcatatgccggcggctttgttttcgcacatcagccgatttatgaagggacggctctaaaatttcttaaattacgctgttaagggtagcatattctgttttaatttgtttataatgagaggtatggtttatgaacaaaacaatacaaattcgttcttattataggatagaaacagatacatataagtaatagaaagggagtgtccgaccttgagtatcaaacaatattctcaggaacagctgaagcagatggctttagttgaaatcgctcacgaaattttctcagaacataaaaaaccggttccgttccaggagctgctgaatgaaatgatctccttgctcggtgttacgaaagaggaactgggtgaccgtatcgcccaattttatacagacctgaacattgacggccgctttattgctctgtcagaccagacgtgggggcttcgcagctggtatccgtacgatcagctggacgaagaaacacagccgactgtaaaagcgaaaaagaaaaaagcgaaaaaagtcgttgaggaagatctcgaccttgatgaattcgaggaagttgacgaagatgacatcgatctcgatgaaatagaagaagatattgaccttgaagcagacagctttgacgacgaagatatcgatgaagaagatgacgacgagcttgagatcgaagacgagatgattgaagaagatgaggaagattatgatgatgaggaagaggatcgcaaagactgattttatatcagcaaaacgatcttgactttcattgtcgaactatgtagtatgtattttgggctcttcaaaaagaagagaattcataagagtgctacgctccctttcaagaaattgaaagggagctttcttattttcatctcccaaattcttttacacatcatttgtttttagtgaaatgattttctataaaacggcacattttaaggaatgtagcgcagaccgaagagaggagcaaacgaaatgacgaaatatatttttgtaaccgggggagttgtatcatcactcggaaaaggaattgtggctgcgtcacttggccgccttttgaaaaacagaggcatgagcgtcaccatccaaaaatttgacccttatatcaacgttgacccgggaacgatgagcccgtaccagcacggtgaggtattcgttaccgatgacggcgctgagactgaccttgacttagggcattatgagcggttcattgacattaatctaaacagattcagcaacgtgacgaccggtaaaatctattctgccgtattgaaaaaagagcgccgcggggactacctcggcggaacggttcaggtcattccgcacatcacaaatgaactgaaagaccgcgtgtaccgtgcaggcaaagaaacaaacgcagatgtagtcattactgagatcggcggaacagtgggagacatcgaatcccttccgttccttgaagccatccgtcaaatgaaaagcgacatcggccacgaaaacgtgatgtacattcactgtacgcttgttccgtacatcaaagcggcgggcgagctgaaaacaaaaccgacgcagcacagcgtaaaagagctgagaagcctcggtattcagcctaatatcatcgtcgtgcgcacggaaatgccgatttctcaagatatgaaagataaaatcgcgctcttctgcgatattgacacgaaagcggtcatcgagtgcgaagatgcggacaacctttactccatcccgcttaaccttcaggagcagggactcgataagcttgtctgcgatcatatgaaattagaatgcaaagacccggatatgacggaatggaaagaccttgtcacgaaagtgaaaaacttgtctaaaaccattacaatcagcctcgtcggtaaatacgtcgagcttcaggacgcttacatttcagtcgttgaatcactgcgccacgccggctatgcgtttgacgctgatgtgaagatcaaatggattaacgccgaagaagtgacagaaagcaatattcaagagctgactagcggcacagacggaatcatcgtgcccggcggtttcggagaccgcggcgtagaagggaaaatcatcgccgccaagtatgcgcgtgagaataaaattccgttcttcggcatctgcctcggtatgcagattgcatccattgaatatgcgcgaaacgtattaggtctggaaggggctcactctgcggagatcgatccgtccactccttatccgatcatcgatcttctgccagaacaaaaagatgtcgaggatctcggaggaacgcttcgtctcggactgtacccttgtaagcttcaggaagacacgaaagccttcgaagcgtatgcggatgaagtggtatacgaacgccaccgccaccgttatgaattcaacaacgaatacagacagcaaatggaagagaacggttttgtgttctcaggcacaagccctgacggccgtcttgtggaaatcatcgagctgaaagaccatccttggtatgtcgcttgccagttccaccctgagttcaaatcaagaccgacaagacctcagcctttattcaaagactttatcggcgcttccgtacaagctgcagaacagaagtaataaaaaaagacttgcctcctttaaaagtggcaagtcttttttctgcatcaggcatattcctgcatcatttcctttaacgtaaaggacagtgcgtgatagacatacaggcctgtcattaatgaaggaaagccgtatcttgtcccgtcttcatcaggcagaagcggcatttttaatttgctgtcaatatgaacatcacaaaattcctcaatcccggtttgatctttgatgacaggagatacgccaacgaggccgatccctttttcataaagcttttgagccagcgcctgttcttcagccgtgcccggacctgaacaaaacatcagcaccctgtcgctttctgtaatcgaatcagctgtatccggaaacgctttgacggaaggcatcggttctgagccgagttccgcctcgcacaaaatgccctgcatctcatttgcgccgtataaataaatggtatggccgctgacggctgcctgcgccagcaggcgcgcgccgtcttctattgcttcggattccttatcctgaatgcgggaaaaaatgcctgcaagctgcgtcgtaaatatctttaacatgagtgaaacctcctttacacatacaagaacagtatacaacaaaagagaaaatgctcagaaaatgtcggaaagtagactattataattaaaggaaatgtgaaaatcaaacagaatacataaacaactgcttccttttgacgaaaatgataatattggggtgtaaaatgatgaatgaaaagattttaatcgtagatgaccaatacggtatacgcatattgctcaatgaagtgtttcataaagaagggtaccagacgtttcaggccgccaacggcatacaggcgctggacatcgtaacgaaagaacggcccgatctcgtgcttttagatatgaaaatccccggcatggacggaatcgaaattctcaagcgcatgaagatgatcgacgaatccatccgcgtcattatcatgaccgcttacggagaactcgatatgattaaggaatcaaaagagctcggagcgctgactcattttgcgaaaccttttgacattgatgagatcagagacgcggtgaaaaaatatttacctctaaaatcgaattaataaaattagaaacaattatgtcattgtgttgccgatttgtcgaaaagttggtatcctagagatggagaaaaagcgatctgttgttttacatatgacaggtttttatggtcatgctataggtggaaagcttttttcgagaagaagcaaatcaggctatataaggaggactttcgacatgcctttagtttcaatgacggaaatgttgaatacagctaaagaaaaaggatatgctgttggacaatttaacttaaataaccttgagttcactcaagctattttacaagcagcagaagaggaaaaatccccggttattcttggtgtttcagaaggcgcgggacgctacatgggcggcttcaaaacagtggttgccatggttaaagctcttatggaagaatacaaagtgacagttcctgtcgccattcacttagaccacggttcaagctttgaatcttgtgcgaaagcgattcatgcaggcttcacttctgtaatgatcgacgcatctcaccacccgtttgaggaaaacgtagcaactacagctaaagtggttgagcttgctcatttccacggcgtttcagttgaagctgagcttggaactgtaggcggacaggaagatgacgtgatcgctgaaggcgtcatctatgctgaccctaaagagtgtcaagaacttgtagagcgcactggcatcgactgccttgcacctgcactgggttctgttcacggcccttacaaaggcgaaccgaacctcggcttcaaagaaatggaagatatcggaaaatcaaccggccttccattagtacttcacggcggtacaggaattccgactgccgacattaaaaaatcaatctcacttggtacggctaaaatcaacgtaaacactgaaaaccaaatttcttctgcaaaagctgtccgcgaaacattggcagctaagccgaacgaatacgatcctcgtaaatatcttggacctgctcgtgaagcgatcaaagaaacggttatcggcaaaatgcgtgagttcggttcttcaaaccaagcttaatccaatgtaacatccataaaccgcctgacagcattgacaggcggttttatgtcttacctttagaaagcgcaatcatgttttacagttctgaaaatttattactggggaggctttccttatgttatttttcattgatacagcaaacattgacgagattaaagaagcttatgaacttggcgttcttgccggagttacgacaaaccctagtttagtggcgaaagaagctgacgtgtctttccatgacagacttcgtgagattacggaagtcgtgagcggatcagtaagcgcggaagtcatttccctgaatgctgaagagatgattgaagaaggtaaagaacttgcgaaaatcgcaccgaatatcacggtgaaaatcccgatgacgtctgaagggttaaaagccgtaaaagcgctgagcgacctgaacattaaaaccaacgtaacgctcattttcagcgccaaccaagcgcttttggcggcaagagccggggcgacttatgtatctccgttcttaggccgtctggatgacatcggccataacggtcttgaactgatttcagaaataagacagatttttgacattcatgacattgatacacaaatcatcgcagcttccatccgtcatgcgcagcacgtgactgaagccgctttacgcggtgcgcatatcggtacgatgccgctgaaagtcattcaccagctggcgaaacatccgttaacggataaaggcatcgagcaattcttggcagactggaataaataagggtgaaaagggcggcaaaccggttgcatccgtttgccgcacccttatgttttcctgtttggcagcgggccttcagtatcaaagtgaagagtgtgtttccccggaatgtgaacccggcgggcctctgtgcatcctgtgttaaaaatgccccgcaaagcttcgctattttcttcctgttattttataatgtccttgtattctttctcttcgaattggctacattttggacaagagctttatttgcagagacagaataaaatgccattttatttacgctccgcagctatcttcttatggaaggagactatcatggaaaagttgaatattgccggcggcgatccgttaaacggaaccgtacatatcagcggcgcgaaaaacagcgccgtcgcattgatacccgcaaccattctggcaaattccgaagtaacgatcgaagggcttccggagatctcagatattgaaacgctgcgtgacctgctgaaagaaatcggcggaaacgtccattttgaaaaaggagaaatggtcgtcgacccttccccgatgatcagcatgccgcttcccaacggcaaagtgaaaaaactccgcgcttcctattacttaatgggcgcgatgctgggccgcttcaaacaggcggtcatcggactgccgggcggatgccatctcgggccgcggccgattgaccagcacatcaaagggtttgaagcgcttggggcggaagtcaccaatgaacaaggcgcgatttatctgcgcgccgaaaggctgagaggcgcacggatttatttagatgtcgtcagcgtcggagcgacgatcaatatcatgcttgccgctgtactggctgaaggtaaaaccgtgatagaaaacgccgccaaggaacctgagattattgatgttgccacattgctcaccagcatgggcgcaaagatcaaaggcgcgggaaccaatgtaatcagaattgacggcgtaaaagagctgcacggatgcaggcatacgatcattccggacagaattgaggcgggcacctttatgatcgccggcgccgcgatggggaaagaagtcattattgataatgtcataccgactcacctggagtctttaacggcgaagctcagggaaatgggttttcacattgagacgagtgacgatcagcttcttatgctcggcgggcagaagcagataaaaccggtcgacgtaaaaacgcttgtttacccgggattcccgactgatcttcagcagccgatgacatctctgttaacgagagccagcggcacgagcgtcgtaaccgacaccatctactcggcccgatttaaacatatagatgagctgagacggatgggggccaacatgaaagtggaaggcaggtcggccattatcaccggtccggccgagcttcagggcgcaaaagtaaaggcgagcgatctgcgtgcaggcgcttgtctggtcgtcgccgggctcatggctgacggcgtaaccgaaattaccggtctcgagcatttagaccgcggctacagcaatcttgagaaaaaacttgaaggtctgggcgccacaatctggcggcaaaggctgacggacgaagagatagaacagctccaaaattcatagaaatgcggacttttgagaggagatcgtgttgaaatggaaagaagcttatcgatggaattggttcgagtcactgaagcggcggctttagcatctgccagatggatgggccgcgggaaaaaagatgaagctgatgatgcggcgacaagcgcaatgcgtgacgtgtttgacacggtgccgatgaaaggcacggtcgtgatcggggaaggcgagatggatgaagcgccgatgctttacatcggcgaaaagctcggaaacggatacggccctcgcgtcgatgtcgccgtcgatcctcttgaaggcacaaacatcgtagcgagcggcggctggaatgcgctgacggtgatcgcggtcgccgaccatggaacactgctgaacgccccggatatgtatatggaaaaaatcgcggtcggtcctgaagcggtaggctgcatcgatattgaagcgcctgtcattgataacttaaaagccgttgcgaaagcgaaaaacaaagacattgaagatgtcgtggcaaccattttaaatcgtgacagacacgaaaaaatcatctctgaattgcgtgaggcgggcgccagaatcaaactgatcaacgacggtgatgtcgcgggcgccatcaatacggcctttgaccatacgggagtagacattctcttcggttcaggcggggctcctgaaggcgtgctgtctgccgttgcgttaaaagcgctcggcggcgaaatcatcggcaggcttctgccgcaaagtgcggaagagcaggcccgctgtgagcgaatgggccttgatgtatccaaagtgctccggatggaggaccttgtgagaggggatgacgccatttttgccgcaacgggcgtcacggacggagagctgctgaaaggcgttcagttcaaaggctccgtcggcacgactgaaagtctggtcatccgggcgaaatcaggaacggtccgattcgttgacggaagacacagcctgaagaaaaaaccaaatcttgtgatccggccataaatagagaaaagcgggacggaaagtcccgcttttcttttgcaataaagagtcaaccctatcatttatatgtcaaagcattatttaagttgaataattttttgaaatgaggtaaaaataaagagtgctgcgatttttctgtgtcattccttcttttgagtactgggaaattttcaaattctaccgcatacagacgatataaatattgatcttctcaagtttttgtcctcgcttccttcaaaactcattaagacattccttttttaaaaaagcgccgatcatgggtggaagtgttaccgatagaagttcctgaacgttttataaaagaatgtgctttggcggaatcatgcgaagcagccgatttgaatgaaaacagcaatacattgactatgaaaagcgtggtgtttttatgaaagacgtatctatttcctctttggaaaatatgaaattaaaagaactatatgaactggccagacattataaaatctcctactacagcaaactgactaaaaaagaattaatctttgccattctgaaagccaacgccgagcaggaggatcttctgtttatggaaggcgtgctcgaaatcatccaatcggaaggattcggcttcctcagaccgattaattactcgccaagctcagaagacatctacatttctgcttcccagatccgccgctttgatttaagaaacggtgacaaagtatccggcaaggtgcgtccgccgaaagaaaacgaacgctattacggacttttgcacgttgaagcggtaaatggagacgatccggaatctgcgaaggaccgcgtccattttcctgcgctgactccgctttatccggaccgccaaatggtgcttgagacgaaaccgaattatctctcaacaagaattctcgatatgatggctcccgtcggtttcggccagcgcggtctgatcgtggcgccgccgaaagccggtaaaaccatgctgttgaaagaaatcgctaacagcattacgacaaatcagcctgacgctgaattgatcgttctcttaattgatgaaagaccggaagaagtaacggatattgaacgttccgtagcgggcgatgtcgtcagctcgacgttcgatgaagtgccggaaaatcacattaaggtagcggagcttgtgcttgaacgggcgatgcgtctcgttgaacacaaaaaagacgttatcattctgatggacagcattacccgcctggcacgggcctacaacctcgttatcccgccaagcggacgtacgctttccggcgggattgacccggctgcgttccatcgtcccaagcgctttttcggtgccgcgagaaacattgaagagggcggcagtctgaccattttggcgacggcgctcgtagacacgggctcccggatggatgacgtcatctatgaagagtttaaaggaacgggcaacatggagcttcaccttgaccgttctcttgcggaaagacggattttcccggcgatcgatatccgccgctccggcacacggaaggaagagctgctcgtgccgaaagagcatcttgaccgtctatgggcgatccgcaaatcgatgtctgattctccggacttcgcagagaagtttatgagaaaaatgaaaaaaacaaaaacgaatcaggaattcttcgatctgatcaaccaagaatggaagcaggcaaacctttcatcatcagcccgccgctgataaaaaatgtatttgcaaatgcagtaaatgactgatataattctctcatatgcgttccggattactccggaataataactctgtttccacacgggattcagggcggaaggagatggatacaatgaaagcaggaattcatcctaatttcaaaaaagcaacagttaaatgcgcttgcggaaatgaatttgaaacaggctcagtaaaagaagaggtacgcgttgagatttgctctgaatgccacccattctacactggacgtcaaaaattcgcttctgctgatggtcgtgttgatcgctttaacaaaaaatacggtcttaagtaataatagattttacaggcaggcaagaattgcttcttgcctgttttttatgtccataaacaggaaaaaaaggggagcggatagcctatgtacataatgaagcaaagcggatggcttgagctgatatgcggcagcatgttctctgggaaatcagaagagctgatccgcagagtgaaaagagcgacatatgcgaagcaggaggtcaaggtattcaaacctgccattgataatcgctacagtgaggaggccgtcgtttctcacaacggtacatccatgacaagccacgtcatctcgtcttcggctgaaatatgggatcatatcagtgaaagcacggacgtcatcgcggtagatgaggtgcagtttttcggcgaatcgatcatcggcgacttatcctcgcttgcggataaaggctatcgtgtcatcgcggccggacttgatatggatttccggggagagcctttcggcgtggtgccgaatctgatggcggttgccgaatcggtgacgaagctgcaggcggtctgctccgtttgcgggtcgccggcaagccgtacgcagcgtttgattgacgggaagcccgcttcctatgatgatccggtcattttagtcggcgcgtcggagtcatacgaagcgagatgcagacatcatcacgaagtgccgaaaaaaacagactgataaataacccttttcatgaaaacatcggtaaaaactccggtgtttttttgacgttttttcaaaaattgtagttaaataacttaaaaaagagtatgaaaaaattaagtaattttcatctcttgaattttcatttttacaggcataaaatgactaagtaatgtaaatagttatgagacattgttcgaataattgtcaaaaaaagatatagcagatcgcgatcacactagccaaaatgggtaattacttaactttgttaactatttgaagaaagaaggagattttcttgaataatattaaagtaacgaaggaaggcaacttagaaactactttaagaggaaaagaagttctatctatccctactttaaataaaggtgttgcgttttcagcagaagaaagaaaaagccttggattagacgggctgcttcctccgacaattctgtctcttgatgagcaggcaaaacgcgcatacgagcagtttcaagctcagccggaccgccttcgccaaaacgtgtatttgaatgatttgcaaaaccgtaacgaagttcttttctttaaattgcttcaaaaccatcttcgtgaaatgctgccggttgtttacacaccgactgtcggtgaagcgattcaagaatacagccatgagtacagaagacctcaagggatttacctttctatcgacaacgtggaagggattgaagaggcatttgaaaaccttcatgccactgccggagatattgatctgatcgttgcgacagactcagaaagcatcctcggaatcggtgactggggtgtaggcggtatcaacatcgccatcggtaaattagcggtatacacagctgccgccggtattgacccaagccgtgttattcctgtcgttcttgacgtcggtacgaacaatgaaaaacttctgaacgatcctttatacatcggtaaccgccatgaacgtatccaaggcgaacgttacgaagctttcgttgacgcttatgtaaaagctgcgcttaaatatttccctaaagctcttcttcactgggaagaccttggaaacaaaaacgcgcgcaatatcatgaagaaatacaaccatgaaattcttacattcaacgatgacattcaaggaacaggcgcgattacgcttgcaggtgtgcttgcggctatgaagaaaacaggcgcgtctattaaagaccagcgtgtggttgtcttcggtgcgggatctgccggaatcggaatcgctgaccaaatccgcgacactatggtgcttgccggtctttctgaagaagaagccaacaaagcgttctacacaatggactacagaggcttgttaattgaaggtatggaaaacattcttgatttccaagagccgtacctgcgcacagctgaagaaattaaagattggaaacgcgatgaaaacggacaaattcctttcattgaagtgatccgtcaagcgaaaccgacaatcttaatcggtacatcaggccaaagcggcgcgttcagtgaagaaatcgtcaaagaaatggcaaaacacgttgagcgtccggtcatcatgccgatgtctaacccgacaccgcttgctgaagccgttcctagcgatcttttcaaatggactgacggcaaagtgcttgtggcgacaggaagcccgtttgacaatgtagagtacaatggcgtttctcatgaaatcggacaatctaacaacgcattcgcgttccctggacttggtctcggttcaatcgttgtagaagcgaaagtgattactcctgcaatgtttgcggcaactgctgacgcaatcgcagaaagcgttgattttgaaacaccgggtgcaggccttctgccgagcatgagcgacttacaagaagtttcaattaaagttgcgatcgccgtagcggaaactgccattaaagaaggcgtggcaaaccgcattcctgaaaatgtagaacaagccgttcttgatgcaatgtggaaaccgcaatataaacaagttgtcgctaaataatttttacgattaattttacagtccgagggaaagcttttatgtaaaggctaaagtatacggacattaaggatttggaggagaacattttgagcttcttagatattttaatcctcctggcgccgatctttttcgtgatcgtgctgggatggttcgcaggtcgcttcggaagttatgacgcgaagtcagcaaaaggggtaagcaccttagttacgaagtacgcgcttccggcgcattttatcgctagtattttaaccacttcaagaagtgcgtttttatcacaggttcctttgatggtcgctttgatcattgggattgtcggattctttatcgtcattctgttggtttgcaaatttatctttaagtatgatttaacgaattcatctgtattttctttaaactctgcacagccgacttttgcttttatgggtattcccgtactaggaagcttattcggagcaagcgaagtagcgattcctatcgccgttacgggtatcgtggttaacgccatccttgacccgcttgcgatcattatcgctactgtcggtgagtcatctaagaaaaaagacactgaaaacgagaacttctggaaaatgactggtaagtctattcttcacggtctttccgaaccgcttgcggctgcaccgcttatcagtatcattctggtactctgcggtgtaacactccctggcttgggagaaaaaatgcttgatcagctcggaagcacaacatcaggtgttgcgctcttcgccgtcggtgtaactgtcggtatccgcaacattaagctcagtctgccggctttcggtatcgctttgttaaaagttgccgttcagcctgcgctgatgtacttgatcgctcttgcagtcggacttccggctgaccagatcactaaagcggtattgctcgttgcattccctggatctgcggtagcggcgatgattgccacacgtttcgaaaaacaagaggaagaaactgcgtccgcgttcgtgatcagtgcgattttatctctcatctcactgccgatcatcattgcgctgactgcataatgaaaagctccctgtttcagggagcttttttgattagaattgaaatttaaaaggcgaaaatctcgttttttttctgggtttcttatgttctgaagaagcggctgtttctgagaggggagctgtctgggcaagttcctggatgcgggaggccaatgtctgcaattcggtattgaggtcgtcaatttcccgcctgtgctgaagaagctgataagacaccccttcatccgccttttgtttcagctggcgttcaagctcctctatccttgaaagcagatggttctcaccttgtttctctttcgtgagaatgtccagtttgcgctccagctctgccaatctttgttcagcgccgccattgattttcggacgctgcaaaatgaagcccgtccgttttttcggctgccggggcacttgaacgtccagaagggcagtgccttcagaaatttgccgtttgaccgatttcagcacatcaagatcctcaggtgtaaaggaataatgtccgagctcattccgttcagccggaagattcagctgtttgacccacctttgcaccgtttttgcggagacgccgagctctttcgcggccatgtttgtattcatgatcacatacctcctttttgctaggtattcgaccatgaggcggcgttcccttcatgttagacaaaacaagaaggaattcgccaaagaaagcggcatttcttcaaaaaacttacgcttcatacaattcaagcggaagcttgtcgggatcaaagaaaaaggtaaaccgtttccccgtcagcggatcggttctgattggttctgtgccgacgcccttttcctttaactctctgacggctgcttcaagatcgtttacggtgaaagcgagatgccggagacccgcggcttccggtctggtcggccgttcgggcggatcgggaaaggaaaacaattcaatcgcgtacgcgccgtccagcgcaagatcaagtttataagattcccgttcctttcggtatgtttcttttataatgccgaagccgagaatctcggtgtaaaaagctttcgacttttcataatcagagcatatgattgctatatggtggatggatttcagcatatccgctcctccttttttgcttcagtataacagaggcgaattgcttttgactggcgataagccctatactataatgagaatgttacgcacaggaaaacagaggtgaagaccgtgttagaccgtttacagtcaattgaacaacgatacgaaaaattaaatgagcttttaagtgatccggaagtggtcaacgatccgaaaaagcttagagaatattcgaaagagcaatctgatatacaagaaaccgttgaagtctatagacaatacagagacgcatcagaacagcttgccgatgcgaaagcgatgcttgaggaaaagcttgatgccgatatgagagaaatggtgaaggaagaaatctccgaactgcagggagagacggaaaccttatcagagcgtttgaaagtgctcctcatcccgaaagacccgaacgatgataaaaacgtaatcatggagatccgcggagcagcgggaggagaagaagccgcgctgtttgcgggaaatctctacagaatgtactcccgttacgccgaaatccaaggctggaagactgaagtcatggaagcaaacgtgaccggaacgggcggttataaagaaatcatctttatgattacgggaaaaggcgcatactccaagctgaagtatgaaaatggcgcgcaccgcgtacagcgtgttccggaaacggaatcaggcggccgtattcatacatccacggcgacggtggcgtgtcttcctgaagcggaagaagtagaagtggacattcacgaaaaagacatccgcgtcgatacattcgcatcaagcggaccgggcggacaaagcgtaaacacgacgatgtcggccgtacgcctgacgcatttaccgaccggtgtcgtcgtttcctgtcaggatgaaaaatctcagattaaaaacaaagaaaaagcgatgaaggtgctccgcgccagaatctatgacaaattccagcaggaagctcaggctgaatatgatcagacccgtaaatcagccgtcggttcaggcgaccgttccgagcgtatccgcacatacaatttcccgcaaaaccgtgtgacggatcaccgcatcggcctgacgattcaaaagctggatcaaatcctggaaggcaagcttgacgaagtggttgaagcgttaatcgtagaagaccagtcaagcaagctccagcaggcggaaaattaagatgaagaccgtttttgaagccctaagctgggcttcttcttatttaaccgaagcgggaagagaaaaaaacgcggccgagctgctgttgttaaatgataccggaatggaccggagcaagcttctcgcaagtctgcaggaggccgtcggcgaggacgagctttatcgattcaggcggcacgtggagatgcataaagaaggtattccgattcaatatattatcgggaaagaacagttttacggcagggaattttttgtgaatgacgatgttctcattccgcgtccggaaacggaagaagtcgtctttcatctgctggacagacagaagcgggcattttccgaggcagaacgactgaacgtcattgatatcggtacggggagcggagccattgcggtgacgctcgcgctggaatgcggacatttttcagtatcggcttcggatatttcaaaagaagcgctgcaggtggcggaaagaaatgcgcaaaacctcggagcggacgtctgttttttgcagggagatctgttaactccttttatttcatcagggaaaaaagcggatattattgtttccaatccgccgtatatttctgaagaagaaatggcggatttgtcggatatcgtccgtttccatgagccgcttcatgctcttacggacggcggtgacggtttgaaattctacaagcggtttatggaggagctgcctcttgtcatgaaagataaagcgcttgtcgtctttgaaatcggatataatcaggggaaagccgtgaaagacctgttccgtcattcctttccgaatgcggaagtggaagtcgtacaggacatcaacggaaaagacagaaccgtatccgcggtcatcacatcatgaaaaaagcccgccggtgacgcacacggcgggcttttgttacaatggaaagaaaatgaaaggggcatccgccttgaaaaaagcgttcgccttcggatgtatactcgccgccgcagcttatgcggcgggggttgttctgccgtttggtgttgacatcattttcggcgccgttacggctgttcttatcgtcacagcgattatcgtttccgggttggccgtaagcggagcggagcagcgggccaattatcattctgaaacagaagaaggacggcacgcccgtttaaagatggccgccgttttcttttgcgccgctctcccttcagccggctgtctgctgattacgcttctgtagccggattttgtctttgcagcaatacggaatcccatacccaatagacgacggctgttaaaaccgcaaagatataaaaggctgaattagaaaacagagattggcctgacggctgcaaaagaccgaagatgatcccgtttgcaatgaatgacacccctaaataataaagaaaatacagcggatgaaatctcttcggctttttattcagaaagtattgaagcggcagcgcaaaaatcaaataaggaaacaaaaaataaaacgccatcgaaatgaaagccgcgataatgaattgatgaacatacaaaatagaataaatgacagacatacatgccgccgacagcagcacggtgtaattatatttcatctgaaaacctcctatcaaaataatatcgtaccatattttgaatctgtcaatgcagattatcagcttgctagatttttttcttcccgccggtttaaaccttttccgtcatgtccataatgggactagataaaaaaagcacggagaggaacggtggggaccgatgaaacagacaatgatgatctgcatatatatttttcttttattatcaggagcgcttgcgggtttgacaaaagaagaaacggcgcgggcatcagccgatgagcccgtcgtcataccggatgaagcgatccggctcagaattttggccaacagtgataacgatgaagatcaaaagctcaagcgccagatcagagatgctgtaaacaagcaaatcacggactgggtgaaagatatcacttccattgaagaagcgcggcggctcattcgttcgaagcttcctgaaattaaagaaatcgccaaacaaacgatgaaagaaaagggtgcgcatcagtccgtttcagttcaattcaataaaatctcgtttccgacaaagctctacggcaatatggtctatccggccggaaaatatgaagcgattttaattacactcggcaatggcgagggcgccaactggtggtgcgtcttgtttccgccgctgtgcttccttgatttctcaaacggcgaagcggtgaaagatcaggaagacggcggacagaagcaggaagaaacgcagaaacagactaaaaaagtgctggatgacgtaaaagcaaaggctgataaagcgaagaaagaaaataaagatgacgatgatacagaagtgaagtttttcctcgtcgattggatttcagatctattttcctgaagtaaaaggcataaatccggattcgattcatagattggaagaaagagttgatcgaaacggagggaaatatatgttttatcagctgagagtggcaagagatcaagatacggaggcgctggaggcctttttgaaaaaggctgatacggcacatgcggaaatcgatcagcagatcagccggtttatcgtactggaagacagcgaaaaaatgattgccgcctgtctcgggatcgaaaaattcagcggcggaaaagggcttctccgttcactcgtcatgtcggacaggctgaatcaaagccatatcgttacactgtttcaaagtatggatgtgctgtgcaaaaaacatgagattcaagatgtctacttagtcgccaatcagccctcatctgctgagtttctgaatgtgatgggatttgaagcgtgcgccgatgcgcctgatgaactgtatacgtccgaacatttccgcaactcgttatgcacagaaggttcgtttttaatggtgaaaacctctgcctgatctaacttatacacaaggttatccacttattaaaaagtgttgtccacagtttgtggataacacttgttttattaaaggacatcttttatactttcaaaaggaatacacgagagaaaataaagttttaccgctttaaaataaggagtttggttctacatgaaaacaagaagatggtttgtggattgttccgcagaattatccacaaccgatccccagattacacaagccgcggaattgctgcggcagaatgaggttgtggcttttccgacagaaaccgtttacggactgggcgctaacgctgaaaatacggaagccgtaacgaaaatatatgaggcgaaaggaaggccgagcgataacccgctgattgtgcatatatcccatatcagccagcttgatcgttttatcagccatattcctgagacggcgaaaaagcttatgaagctattctggccgggggcgctgacccttgttctgccgtgtaagcccggtgtgctgtcaccccgtgtcaccgcgggacttgagacggtagcggtcagaatgcctgatcatccggtagcattagccctcatcagctcggccggactgccgatcgccgcgccgagcgccaatttatcaggaaaaccgagcccgacgaaggccgagcatgtagctcatgatttaaacggccgcattgccggtattgtggacggcggcgccacgggaatcggagtggaatcaaccgttctgtcctgtacggggaaacagcccgtgctgcttcgtccgggcggcgtgacaaaagagcagattgaatccgccgccggttcggttcttgtggataaagggctgaccgaagaagatgaggttcctatttctcccggtatgaaatatacacattacgcgccttctgcgccgatggctattgccgacggcggcgcccggagaattcaagaactggcagacgcatataaaagccgggggaaacgaatcggcattttgacaacagaagagaacgccgatagttaccaggctgattatatcaaggtctgcggcagacgcgccgaccttgaaacagtggcgtccgccttatacgatgcgctccgcagctttgatgaagcggaagtggacatgattatttctgagtcctttccggataccggagtggggctcgccgtgatgaacaggctgatgaaagccgcaggcggcaccgttatccattaacttgttctaccccttatcggacatgcataagctaaacaagcgggcacgtccaagggggtttttatttcatgtcgaatctattcatcggggaacttgtctccttaagcatcatggcatttgctttagggacggatgccttttccgtcgggctcggaatgggaatgattcagctgaagaaaaaacaaatttttcatataggggttgtcatcgggctgtttcatgtcatgatgccgcttgcgggaatggcggccgggcatctgctgtccggttttctggggatgctcgccgtttacatcggcggatctcttcttttcattttaggggtgcagatgatcatcgccgcgtttaaacaatcagacgggccgctcatatctccggcaggctcgggactgttgctgtttgcggtcggtgtcagtctggacagcttttctgtcgggctcagtctcgggatgaacggttccaatccgtttctggccgttacgctgttcggggttttcagcaccgttttaacatgggcgggccttttggcgggaagaaaggtgcagtcgtggctcggctcgtacagcgaagcgctcggcggagccattttgatcggattcgggctgaaactgcttttaccggtataagatacgtaaaaaaagaaacgaagatgccgtttcttttttcttcatttataataggcagtaagaggtgacggacatgaaaataatctttgtatgtacaggcaatacgtgccgcagtcctatggctgaggctctttttaaatccattgcagaaacgaaagggctggacgtcagcgtaagctcggccggcgtattcgcgtctccgaacggaaaagcgtcagcccatgccgtggaagcgctgtttgaaaaacggatcgctctcaatcacagttcatctcccttatcggaagaacatatcgagacggctgatctggtgctggcgatgacggaacagcacaaacagctgattgaaggccgatatcaaaacagtcagggcaaagtctttaccattaaagaatacgtaacgggggaaaacggcgatatctctgacccgttcggcggtccgcttgatgtttataaacagacgcgggacgaactggaggagctgctgacccttttgactgatcaattgcttgacggaaaaagcaagtaatctgtcagaaaatctgcaaacaggtcatttgcaaaacgaatgtgaaagagtagaatgaaatcaacggatttcgtaataaaaaggacaagcacactgggctgtcttcgcccagccacacctaggaggtaaatgaatgaaagtagctattgcgtcagatcacggcggcatccatatccgcgaagaaataaaaagtcttttggatgaattgcagattgaatacattgatatgggctgtgaatgcggcgccggctctgtcgattattcagactacgcttttccggtagcggaaaaagtggtgaacggcgaagctgacaggggaattttaatttgcggcacaggcatcggcatgagcatctccgcaaataaggtaaagggcatacgctgtgcgcttgcccatgacaccttcagcgcaaaagcgacgcgtgaacacaatgacacgaatgttcttgcgatgggcgaacgcgtcatcggcccggggctggcgcgcgaaatcgcaaaagtctggctgacgactgaatttacgggcggccgccacgaacggcggatcggcaaaatcgcagattacgaagaaaaaaatctgtaagaggtgctggacaatggaagagatgaagcaaaaatggacggacatgctgactgagtttcaagagcaggcaggactgacggaaggcagtctgctggtgatcgggtgcagtacaagtgaagccgccggaagccggatcggcaccgccggaagcggggattgggctgaattgatatacggcggacttaaccggtttaaggaaaaaacgggtgtgcatcttgcttttcaatgctgcgagcatttaaacagggcgcttgtcattgaagcggaaacggccgagcggttcaagctccccattgtttcagccgtccccgtcccgaaagcgggcggagcgatggcctcttatgcataccggcagatgcgttctcccgtgctcgctgaatcgattcaggctgacgccgggattgacatcggtgatacgttcatcggcatgcatctgaaacccgttgccgtccctgtccggatatcaagccgtgagcttggagaagcacatgtgacgatggcccggacaaggccgaagctgataggcggaattcgcgccgtttatgaatgcgaatgatgaaaatacttttcctgtataatgttcgtgttttctaattaaattttgtgatttttttaaataagctgttacattcacctgaaaaaccatgtacaataagggtggtaaaaataaagaacaggaaacggataggagaggatctcgctgatgaaacatttacctgtacaagacaaacaagtgtttaacgccatcaaagatgagcgtaagcgtcaacagactaagatcgaattaattgcttctgaaaacttcgtgacggaagcggtaatggaagcgcaaggctctgttttaacaaacaaatatgctgaaggctaccccggcaaacgctactacggcggctgtgagcatgttgatgtcgttgaggacatcgcccgcgaccgcgcgaaagagattttcggagctgagcatgtaaacgttcagccgcactcaggcgctcaagcgaacatggctgtttacttcacgattttagagcacggcgacacggtgctcgggatgaacctctcccacggcggccacttaacacacggaagcccggttaatttcagcggcgttcaatacaactttgtagaatacggagtcgataaagacacgcaatatatagattatgaagatgtgcgtgaaaaagcgctggcgcataagccgaaactcatcgttgccggagcgagcgcgtacccccgcacgatcgactttaaaaaattccgcgaaatcgctgatgaagtcggcgcttacttcatggtagacatggcgcatatcgcgggtcttgtcgcagccggtcttcatccgaatccggttccttacgctgactttgtaacgacaacgactcacaaaacacttcgcggaccccgcggaggaatgatcctttgccgtgaagagttcggcaaaaagattgataaatccattttcccgggaatccaaggcggaccgcttatgcatgtcatcgcggccaaagccgtttctttcggagaagtgcttgaagatgatttcaaaacatatgcgcaaaacgtcatctcgaacgcgaagcgcctggctgagtctctgaacaaagagggcattcagctcgtatcaggcggaacggataaccaccttgtgcttgtcgacctccgttctctcggactgaccggaaaagtcgctgaacacgttcttgatgaaatcggcattacatctaataaaaacgcgatcccttacgatccggaaaaaccgttcgtcacaagcggaatccgtctcggtacggcagctgtgacaagccgcggctttgacggtgacgcgcttgaagaagtcggcgccatcatcggcctcgcgctgaaacatcatgaagacgaagcaaaacttgaagaagcgagacagcgcgtatctgccttgactgaaaagtttcctttatataaagaactaggctattaataaggaagaaacccgccggaaccttaatccggcgggtttttttatgattttcttgaaactgtttgtctttttctgtagaatcaatagaagtgtgaaaaagtcactcggacaacaaaaaaggagctgaacacagtatgggaaaggtttacgtatttgatcatcctttaatccagcataagctgacatatattcggaatgaaaatacaggcacaaaggatttcagagaccttgtggacgaagtcgcgtcactgatggcgtttgaaattacacgtgatcttcctcttaaagaagtggaagtgaaaacacctgttcaaacagcgacttccaaagtgatttcagggaagaaactcggtatcgtgccgatcctgagagcgggtctcggaatggttgacggcatgctgaaattaatcccggccgctaaagtgggacatgtcggattataccgtgatccggaaaccttaaaaccggtggaatactatgtcaagcttccttctgatgtagaagaacgcgaatttattgtcgtggatccgatgcttgctacgggaggttctgcggtggaagcgataaacagcctgaaaaagcgcggcgcgagaaacattcgttttatgtgtcttgtagcggctccggaaggcgtggaagagctgcagaaacatcattctgacgttgatatttacatcgcagcccttgatgaaaaactgaatgaaaaaggctatatcgttccgggcctcggtgacgcgggtgacagactgtacggaaccaaataaatcggaaaacctcattcagggggttttctttttttatccagatatttgctgaatgggcagacttcatacatttataggtgaatttgtgaacattctgtgtatgctttcggtataaaaagttttttaactttaaacagattgacacatgttaggggctattgtatgctaaacgagggtattatgagaaggttttcattcctttcatttctagtatccatcctcattttaaatcctccaaaaaacccgttatatgaggatttatctaagcgaatgaaacagcatcccgtggcatcaggaggatgagtggttttttcgaacaggccgttttgcggacaaaaaaggccttctgcaagggttaaccgcatgttttgccgtatccaggaattatattacattttcatcaggagacagatagttgatggacgatcccaatcttacattcagcagacaacggagatatgtatttgtaatcttagcaatctatttgctgggatatggtcttacggcgtataaaactgtttttttaggcctctttttgggaactgttttcagtttgtttaatttgtggctcttgaccagaagaatgaatgcttttgacaaggccgtggcgaaaggaaagtccatacgatcactcgggagcgcagcgcgttggtgcaatgcgatacttgcgatggctgtcgcctttaaatatcccgataaagtcagtgtggcaagtgtgattattggattaatgacaatttatcccgtcattatgatagattccattattcagctcaaacgttcatcaatggaagagaggtgaaaacccattgaatcacgattacagaactattgatttgtttggtcttacttttaatctgacaaacattctgatgattactgtggcaagtgtgattgtgctgctgattgcgattctcactacgagaacgctgtccatccgtccgggaaaagcccagaacttcatggaatggattgttgattttgtccgcaatattataggcagtacaatggatttaaaaacaggggctaacttcttggcgcttggtgtaaccttgctgatgtacatatttgtatcaaatatgctagggctgccgttttctgtaacggtcggacacgagctttggtggaaatcaccgacggccgatccggctattactctgactctagccgttatggttgtgtcgttaacgcactattacggcgtgaagatgaaaggtttgaaggaatattctaaggattacctcagaccggttccgcttatgttcccgatgaagatcattgaggagtttgcgaatacgctgacactcggacttcgtctttacggtaacattttcgccggggaaattcttcttggcctgcttgcgaatctggcgacgaatttctactcaaacagtttctttctcggtttggtcggcacagtcggagccattattccgatgcttgcatggcaggcattcagcttgttcatcggtaccatccaggcatttatctttacgatgctgacgatggtgtacatgtcacacaaaatcagtcatgatcattaaaatcatatatccattcggataacattttaaaggaggaactttttcatgaatttaatagcagctgcaattgcaatcggtttaggtgcacttggtgcaggtattggtaacggtctgatcgtttcacgtacggtagagggaatcgcccgtcagccggaagcaggaaaagaacttagaactcttatgttcatgggtatcgcattggttgaggcccttccgattatcgctgtcgttatcgcgttcttagcgttctttggctaagcaaaaaagccttatatgaactaaaaatggcgaagatcactctaagagaaccttcgccattgctttatgtctgataagcaggccgtcccaaaacggctttttatcagcagagaaaacctgcagaagggagttgccgtagtagatgtctcaattacctcttgaattaggactgtcgtttaacggcggagatatcctattccaattgttagctatgctagttttattagcgcttctcaagaaattcgctcttggaccgctattaaatataatgaaacagcgtgaagatcatatcgccggcgaaattacgtccgctgaagaaagaaataaagaagcgcagaagctgattgaagagcagcgcgttcttttaaaagaagcgaaacaggaatcacaatcactcattgaaaatgcgaaaaaactgggtgaaaagcagaaggaagacattatccaggctgcacgcgccgagtctgaaagattgaaagaagcggcgagaaccgaaattgtcaaagaaaaagaacaagcggtttccgcacttcgcgagcaagtcgcatcactttctgtcttaatcgcatcgaaagtgattgaaaaagagcttgatgaacaagcccaggaacaactgattcaggactatcttaaagaggtaggagaaagccgatgagtggatctgctgtctctaaacgatacgcgtcagcgcttttcgacattgccgttgagacttctcaaatcaatgaaatcgaagaagagcttaccgtactaaaagaagtgttccggaacgaagccggattacaggaagtgttaagccatccgaaggtatcggccgctaagaaaaaagagctgattcagcaatcgttcggcgcactgtctgagtctgtgctgcatacgatttttcttctgattgaccgccgccggtcttcgattgtgcctgatctcacagacgagtttatcaaacttgccaatcaggcccgtcagacagaggacgcggttgtttattcagtaaaaccgctgtcagaagcggaaatgttatcattgtctcaagtgtttgcaaaaaaagccggaatcgcttcgctcagaatcagaaatgaagtgcagacggatttaataggcggcattaaagtccgcattggaaaccggatttatgacggaagcgtaagcggaaagcttgagcgcatggaacgtcaacttgccggaggaaatcgatagaaggggtgaaacctaagtgagcatcaaagctgaagagattagcacgctgataaagcagcaaattcaaaattaccaatctgaaattgaagttcatgacgtaggtacagtcatccaagtcggagacggtattgcgcgtgtgcacggccttgacaattgtatggccggtgaacttgttgagttttcaaacggcgttttgggtatggctcaaaaccttgaagaatccaacgtaggtatcgttatcttaggaccttacagagatatccgtgaaggtgatgaggtcaaaagaacgggccgcatcatggaagttcctgtaggtgaagaattaatcggacgtatcgtcaacccgctcggacagccggtagacggactgggtccgattctgacaagcaaaacacgtccgatcgaaagccaggctccaggcgtaatggaccgtaaatcggtacatgagccgctgcaaacgggtatcaaagcgatcgacgcgttaattccgatcggccgcggacagcgtgagctgattatcggtgaccgtcagacaggtaaaacatctgttgcgattgatacaatcttaaaccaaaaagatcaagacatgatctgtgtgtacgtagcgatcggtcaaaaagaatctacagtgcgcggcgtggtggaaacacttcgtaagcatggcgcgcttgattacacgattgtcgtgacagcgtccgcttcacagccggctccgcttctgtaccttgcaccgtatgcaggggtgacaatgggtgaagaattcatgtacaacggcaagcacgttctcgtcgtatatgatgatttatccaaacaagcggccgcttaccgtgagctgtcattgcttcttcgccgtccgccgggccgtgaagcattccccggggatgtattctatcttcactcccgtctgcttgagcgcgcagccaagctgagtgacgcaaaaggcgcaggatcaattacggcgctgccgttcgtcgaaacacaagcaggagatatctccgcttatatcccgacaaacgtcatttccattactgacggacagattttccttcaatccgacctattcttctcaggcgtgcgtcctgcgatcaatgccggattatccgtatcccgtgtcggcggatcagcccaaatcaaagcgatgaaaaaggtagcgggaacattgcgtcttgacctggcttcataccgtgaacttgaagcgttcgcccaattcggatctgatcttgaccaggcgactcaggcgaaactgaaccgcggtgcgcgtacagttgaagtgctgaagcaagacttgaataaaccgcttccggttgaaaaacaggtagccattctttatgcgctgacaaaaggatatcttgatgatattccggttgcggatatcagacgttttgaagaagagtactacatgtaccttgatcaaaaccataaagatctgcttgacggcattgcgaaaacaggaaaccttcctgctgatgaagacttcaaagctgcaatcgaaggtttcaaacgcacatttgcaccaagcaactaacccttagaagatgagagaaaaaggttctctttttctctctttttacgcaaatgaagaataaaggtggtgaaatctttggcctcattacgcgatattaagtcaaggatcacgtcaacgaaaaaaacaagccagattacaaaagccatgcagatggtatccgctgcgaagctgaaccgtgcggaaaccaacgcgaagtcatttgctccgtatatggataagatccaggaggttgtgtttaacgtcggaaaaggcgcgaaaaacgcgaaacacccgatgcttgtctcaagagaagtgaaaaagacggcgtatctcgtcattacgtctgaccgcgggcttgcgggtgcgtttaacagttcggttttgcgaaacgcttaccgcaccattcaagaacgccatcagtctaaagatgaatacacggtgattgcaatcggcagagtcggccgcgatttcttcaaaaaacgggaaatgccgattttgtctgagttagtggggcttggcgacgaggtcacttttgctcagattaaagatttgacccgtcagacggtacaaatgtttatcgacggcgcttttgatgaactgcatttggtgtataaccatttcgtcagtgcgatttcacaggaagtgacggagaaaaaagtgctgcctttaacggatttcggaacgagcggcgggaagcgcacggcttcatacgagttcgaaccggatgaagaagaggtgctcgaagtgctgcttcctcaatatgcggaaagcttaatttacggcgcgcttcttgacagtaaagcaagtgaacacgctgcgagaatgacagcaatgaaaaatgcgactgataatgcgaaagaactcattgattcactttcgctttcatataaccgcgcgcgtcaagcggcgattacacaagaaattaccgaaattgtcggcggtgcagccgctttagaatagaaagattttgtcaggagggatagcgatgaagaaaggacgcgtaagtcaggtgcttggaccggttgtcgacgtacgtttcgaggacggccacttgcctgcgatttataatgcgattaaagtttcacagccagctacaggcgaaaatgaagtaggcatcgacctaacgctagaggttgctcttcatttaggcgatgatacagtccgtacaattgccatggcatctacggacggaattcagcgcggaatggaagctgttgatacaggtgcgccaatttccgttcctgtcggtgatgtgactctcggacgcgtatttaacgtactgggagataaaattgatttaaatgaaccgctgcctgcggatgctcaaaaggacccgatccacagatcagctccttcattcgatgagctttcaactgaggttgaaattcttgaaacgggaattaaggttgttgacctgctcgctccttacatcaagggcggtaaaatcggattgttcggcggcgccggcgtaggtaaaaccgtattaatccaggaattaatcaacaacatcgcgcaagagcacggcggtatttccgtattcgccggtgtaggagagcgtactcgtgaagggaacgaccttttctacgaaatgagcgattcaggcgttatcaagaaaacagccatggttttcggacaaatgaacgagccgccgggcgcacgtatgcgtgtagcattgacgggtcttacaatggctgagcatttccgtgataaacaaggacaggacgtactgttctttatcgataacattttccgtttcacacaagcgggttcagaggtttccgcgcttctcggccgtatgccttctgcggttggttatcagccgacgcttgcgacagaaatgggtcagcttcaagagcgtattacgtctacaaacgttggttcagttacatctatccaggcgatctacgtgcctgccgatgactatactgacccggctccggcgacaacgttcgctcacttggatgcgacgactaaccttgagcgtaaattaactgaaatgggtatctaccctgcggttgatccgctggcttccacttcccgcgcgcttgctccggaaattgtcggagaagagcattatgcggtggcgcgtgaagtccagtcaacgcttcagcgttacaaagaacttcaggatattatcgcgattctcggtatggacgaattaggtgaagaagacaagcttgtcgttcaccgcgcacgccgtatccagttcttcctttctcaaaacttccacgtagctgagcagtttacgggacaaaagggttcttacgtgcctgttaaagaaacggtacgaggctttaaagaaatcctttccggtaaatatgaccatcttccggaagatgcattccgtcttgtgggacgcattgaagaagtcattgagaatgcaaaagagatgggtgtagaagtttaatctggtcctaggagggtaaaagcatgaagaccgttaaagtcaatatcgttactcccgacggcccagtatatgatgctgatattgaaatggtaagtgtaagagccgagagcggtgatctcggtatcttgcctggccatattccgaccgtggctccgcttaaaatcggcgctgtccgccttaaaaaagacggacagaccgaattggcggctgtcagcggcggatttttagaagtccgtcctgatcaggtcactatccttgcacaagccgctgaaacagcggaaagcattgataaagagcgcgcccttgctgcgaaaaagcgggcggaagaccgtttgaacaaacgatcagatgatactgacattcgtcgggctgagcttgcgctacagcgggctgtaaacagattggatgttgcaggaaactaaaaaagaatccttctcggctgtctgagaaggattctttttctatattaacgcataagagattcatagacgccgataagcggatgatcctcttctttttgcagatataaatgttcgcagcagttgtcggtgtgccacgttttgtttcctctccgcacacccgtcgtataagcgccgtccgtatacggataaggtttgacgacccattcggcatcgtcatggtgtctgatggcgcaatcgatgacatacacactgagcattttctcaaattcgtcaatcggcaggttccaatccgccaaaagcagctcttgtatgctgcggaagtaaagagcttccacttccagcaggctgccgcgtgaataatcaagagaaatgttgaaaaactgacataattctttcagttcctctgtttgagactgtctataatcatagtagaatgctatcgcttcccactcgtggtcaaatacgggaagagtttctccatactgcttttccggatgaaaaaaggaatgattcatattcccatctcctttccaaaaaagtatatcatgccggagaacggacatttaagcggggattgcccctaattttggataaaaattctgatgtaaaaatgatcatctttctctcttcttcttatataataagagaggatatgaggggcggaaaaaatgaaaggagatggaatttgtgaatgtattggggcagcaggccgcaatcagcatcctggttcacctggtatgcattgcggtgacatggtgggcgcttcaggccgtcaactttgatccgctgatccgaaaaggaaaaatagtgcaggcgaggctgctgatcattcttcttaccattgcgatcggtacggcagtcgctgacttctttttagattatcttacctattcgaaacagcttccatacttattttaagatgtttcgtctgttgaaatgaagggaatcgctgggtgagaaaccaatttttcttcacccgcttggcgagttttgacgaagttttccatgtattgctttccccggctccggcaaaaatgggagtaagggggagagatcgatatgaagaaaaaaagagcaggccgcatcatcttattttttgtttttttaagcgccttaatagcggtatttcattccattcatgcaagtgagctgtctccgcttgcccagattgccgaaggaatggagcggcagcaggtcactgtagatgaatggacgcttcatgcgaaaaaaaatctgaacctgtcactgagtgaatttgatgacaaggtaaaagaactgaagacgcagtatccgcaatatcattgggaatccgcgcgggaagataaaatcgtaaaggccgtcggcacgtattctgacaaaaaaaatcacacaacttttaaactgcagctcgtcactaccctcaaaaaccagaacccaacttcgtatttattatatgagcaaatgagcccggagcaaccggaaaactggaatgatacatatgaacagtttgaacggcaggcacatgacatatttcaaaataaagtatttatttttacttgtcttaagggtcatttaaatgataatatgagtattgttttgcaaaaaaaagcagaacagctcatgaaagaatttgaagcaagtccagttgaacatgtagttgagcctcatttcgtttctgtttctgcatttacatataagtggacagattacatcatgacatcgaaacataagatgaatgtgcaagttgcgcttagaagtgcgggaatgggcgaaaaacataccgttacggttggcacaccaatcgtgacgactgaatattaatatagagaatatagggacgcggaggggaataccttggaaaaaatcatcgtccgcggcggtcagaagttaaacggcacagtgaaagttgaaggagcaaaaaatgccgttttaccagttatcgctgcatctttattagcaagtgaagaaaaaagcgtaatatgtgatgtacctacgctctccgatgtatatacaattaatgaagtgttgcgtcatttaggagcagatgtgcattttgagaataatgaagttaccgtaaacgcttcttacgctttagaaacagaagcaccttttgaatatgtgcgcaaaatgcgcgcgtcagtgcttgttatgggccctctgttagcccgtacgggtcattcaagagtagcgcttccgggcggctgcgcaatcggctcaagaccgattgatcagcatttaaaaggctttgaagcaatgggtgcaaaaatcaaagtaggcaacggctttattgaagcagaagtagaaggccgtctgcagggcgcaaaaatctatttagatttcccaagtgtgggtgcgacagaaaacttgattatggcagctgctttagctgaaggaacaacaacgcttgaaaacgtggcaaaagagcctgaaatcgttgacttagcgaactatatcaatgcgatgggcggaaaaatccgcggagccggcacaggcaccattaaaattgaaggtgtcgagaagcttcacggcgtaagacacaacatcattcctgaccgtattgaagcgggtactttcatggtggctgcggctatcacggaaggaaatgtattagtcaaaggtgcggtgcctgagcatcttacgtctttaattgcgaagatggaagaaatgggagtcaaaattacggatgaaggagaaggccttcgtgtcatcggtcctgcccagctgaagccgatcgacattaaaacgatgcctcacccaggattcccgactgatatgcagtcgcaaatgatggcgctgcttctccgtgcgagcggaacaagcatgattactgaaactgtgtttgaaaaccgttttatgcatgctgaagaattccgccggatgaatggcgacattaaaattgaaggacgttctgtgatcattaacggtcctgtacagctgcaaggcgcagaagttgccgctacggacctgcgtgcgggcgcggcgctgattcttgcgggattagtggctgaaggtcatacacgcgtcacggaactgaagcacttggatcgcggttatgtgaatttccataaaaaacttgcggctctcggcgctgacatcgagcgtgtcgttgatgaaacggccgctgaacaagaaagcaaagaagtcgtaactgacctaaacgcataatggctgtaaaaacagtatgtcaatctggcatactgtttttttatggtttatcatcattattatgctctgatttccaaaaaagaatacgtttttcgcgtgaaaaatggaataaagattctgtccaaaaggaagtcatattagcttgtccctgcccataagatgaagtagagtcgaatcccaagcaggaggcagctgatatatgaaaccgattgtatttctactatccgggctgtgtatacttattcttctagtccccaccattctcgtccttccgtttcaggcagaaaaaggagcagccgtaaacagagagcccggacacaaaacagcacacaccacacgagaaacaaaaggagcagaaacattgaaagaatcacctgtatccattccggtttatcggacatccaatcattctgtagaaaacattccgcttgaagagtacgtgatcggtgtcgtggcttccgaaatgcccgcagattttaaaccggaggccttaaaagcccaggcgctcgccgcccggacattcatcgtcagactgatggtcgctgactcagccgtccaggcgccgaaaggatcactggtggatgatacgcaaatgttccaagtctatcaaagcaaaagccagctgaaaaaagaatggggttctaagtacgcacacaacctcaagaaaatcacaaacgcggtggccggcacgcaaggaaagattttaacgtacgataacaagccgattgaggcatctttcttctctacgagtaacgggtatacggaaaatgcggaagcctattggacaagcgccattccttatttaaaaagcgtgaaaagtccgtgggataagcaatcgccgaaatatcttgccacccagaccttcagtgtgccggagtttcagcaaaagctcggcgtacagctctcaggacaaaacacggtgggacagattacagccagaacgccgggccatcaagtggcaacggccgtcatcaacggcaaaaagctgaagggaagagacatccgggaaaaactcggactccgttctgccgactttgaatggaaacgaaacggcagcagcatcaccattacgacaaaaggattcggccacggcgtcggcatgagccagtacggggccaattacatggcggagcagggaaaatcagtggcggacatcgtcaagcattattatcagggagtggacatttccgaagcagattcatttttaaacaaatatatggcgaaaaaatagacgctttcatgagcgtctgtttttttgaaaactattccataaacggtaaagcaaccaacagactcatataacgaaagcctaaaggctgacaaatgtcgattgaaggctgagcgccgggtgtaaatcactgataaaaatgccgcttctatgtgaatatacgcaaaaataatgaggaacgccgtcctatttatttcccttttcatctcatttacgataaatattgttcggcgttgaacgtaaatctattgaaaaggggaaaaagcaatgaaaaaaacattttcactcatactcatgctcggattgatgctgactgctgcatctcctgcttttgctgtcgagaatgcaaacgagaagactctttcatttaaaaacaataccgccattttacttgatgcgagcggcagtatggcaaaacggattgacggtgtttctaaatacaacatggcaaaagaagaaattgtccgttttgcggatcaaattaaatctaaatcacaggtcagaatgacggttttcggttcggaaggcaataataaaaactccggaaaggttcaatcttgtgaatccattcgcggtgtgtacggattccaaaggtttgacagacagagcttccttaactctcttaacggaatcgggcctacgggctggacaccgattgcaaaagcattagaggatgcgaaggcttcctttaccggtttgcacaaacttggcagtaaatccgttttcctgttgacggacggcgaggagacatgcggaggagatcctgttaagacagcgaaagaacttcgcaaacagcatattaaagtcaacgtgatcggctttgactttaaggaaggcttcaacggccagcttcacgagattgccaaagcgggcggaggaaaatattacgaagctcacagccaaaaggatatgaaccgcatctttacaatggcagcgagttcattagcggaataagaaaaggtgccgtttatcggcccttttttttatttttatttaacaaaaatttcaagaaaagatgaagagaaaactgtaaaaagaatcagattccggacttatattacaaaaagggcgaaaaaggcattaaatctgtcatcatttatccaatctttttaggatgatgcgcataattctgttcatttttaacggcgtacagccgcttatacaaaaggaatcccgccctatatctttttgcatacacgtcatctagcatagagaagagccgggggcccatcggccaaaaacaaacggagaggaatgaaggaaatgaaaaaaatgttcactgcggggattgtcggacttttgacgctttcactcggatcacctgtttttgcagctgagaaaaagcacgaagaaacaaacgttgctgtgctgtttgatgcaagcggaagcatgatacaaaaaacagggggagagcgtaaaatagatgttgcgaaagagtctgtcacttcttttgcggaagttcttcctgaagacacgaatctgatgcttcgggtattcgggcataagggcaataataaaaactcaggcaaagccgtatcatgtaatgcgacagaaacgttatacggccttcagccgtacgccgtgactccatttgagcaatcactcagcaagattaaaccgaccggctggacaccgatagcgaaagcgctttctgatacgcgtgaagaatttgagcgggccggcgccacagggaaaaacgtcgtatatctgatcacagacggtgaagaaacatgcggcggtaatcctcaggccgaaattcaaaagctccgtaaagcgaacgtcaacacgatcgtcaatatcatcggcttcaacttcggcatgaaaggaagcgaaagccttgaaaaagcggcggaagcgggaggcggcacatatgtctcagctgacagcgcggacgagttcaaacaggcttgggaagacgctgcaaaggatttagcaaaagaataggttaaaaaaggacgcccgcgcggcgtcttttttgtttagaaaacggaaccgcgggaatgatacggataaaaggagatgaacgctgttgttaaaaggagcaggcattatattagtgctggcggcagtcgtttttgttctgatgggaatttttctgaagcttgccgccttcatattcgtcagtatattggccattatcgccgcagttattttattcaccattctgagcagacatcatcgcaatgaaacatagagtcctaagagggctctttttttaaaccgcaaattcgacaaaatacagggattgtggaagaataaaagagaaggatactgcggaggggaaaacagtggatgaaaaaacaacagcggttagagacatataccgctatgaaaaaggggtattaacaaagacggcagatcggatggtttcagagtatccgctgaccgtcatggtgaacggacaggaatttgttacgctcgtctgcacgcctgaccatttagaggaactcgtcatcggatttctcgcatcagaaggcgtcattcgttttgaaaaagaaatcaaaagctttactatagatgaaagtctcgggtttgcatatgttgaactgacgaatcccggagtgcttgagcaaaaagactatacgaagagggtcatcggttcatgctgcgggaaaggccgccatttttactttcagcaggatgtgaaaacggccaaaaccgccgtcagccgtatcactataactcctgagacgtgccttcgcctgatgaaggagatgcaaagaggaagcggcaccttccaggaaacgggcggcgtccataatgcggcgctgtgcgatacggaaaagctgctcttcatgaggacggacatcgggcgccacaacgcgctggataagctgtacggctgctgtttgaaaaacggaatgccggtccgtgacaagctgatcgtcttcagcggccggatttcctcagaggttttattaaaagccgcaaaaatcggcgtgtcgattgtcatttcaaaatcggcgccgacggagctcgcgctgcaaatggcggaagagctgaacataaccgcgataggttttgtcagaaacggatcatttaacgtatacacacatcctgaacgggttgaacaatagaaaggggtcttgggcttatgaatacagaaacgcgccgggtgacagacaaaagggaaaggccgctcagggatcttcgtatctctgtaaccgaccgctgcaacttcagatgcacgtactgtatgccagccgaattattcggaccggattatccatttttacaaaagacggaattgctctccttcgaggagcttgagcggcttgcgaagctgtttgtcggccgcttcggcgttgaaaaaatcaggctgacgggcggagagccgctcatgagaaaagatatgcctgaattgatcaaaaaacttgcgcgcatccccggacttaaagatatcgcgatgacgacaaacggctctctgcttcccgtgtatgcggaaaaactgaagcaggcggggctgcatcgcgtgacagtcagcctcgattctttagaggatgagcggtttaaggccattaacggccgcggggtttcggtgaacaaggtgcttgagggcattgaggcggcaaaagcggccggactcggtgtgaaaatcaatatggttgttcaaaagggcgtcaatgaaaaagatatcctgccgatggcccgctattttaaagaaaagggtcatattctccggtttattgaatttatggatgtaggcaatacgaatcaatggaataaaaaagacgtgatcacgaaggcagagattattgatctgatcaaccagcacatgccgacggagccgatagaagcgaattataaaggagaggtcgcttccaggttccgctatcttgacggttccggcgaaatcggcgtgatttcctccgtctcggatgcattctgcgcctcctgcaacagagcgcgcctgtcggcgagaggcgagctgtttacgtgcctgtttgcgtcaagcggctatgatgttcggaaactcgtgcgcggcggtctgaccgatgatgaattgacggaatccatcgcttctgtctggagaaatcgcacggatcagtattcaattgaccgcgcgctttctaaaacggatgggaaaaagaaagtggaaatgtcttatataggcggatgaagaaaagcctgcccggacaagggcaggcttttttattcacaatatgagagcggtctgttcaaaaaataccgatgacagccgaaatatatgataggaattttgatgcaggacaatcaagttatgcaattccaaagccatacaatatgttaaaatataaccaatagaaattagaaaaggttgtgaaaggggcatgaccgcatacgagattccgtcatctcaagttggagtcaagatcaacaaatggtacaagcacattttagcgtttcaagcggctgatgccataaagctgaaagaggaaattgatgaggatatacaacgtatggaggaagaccagctgctgctgttatattatcagctgatcagctaccgccatcatattatgcttgattacgtcaagccggaatgcaccgaacaatcacagattcagtacagcgagctgcaaaagacgatcgaaagcacggacagcatatcgggactgtctgagtattatttccatttgttcagagggatgtatgaattcgatcacaataactatgttgcggctatttctttttaccggaaagcggaaaaactcctttcatttgtcgaggatgatatagagagggcggaattccatttcaagatgtctgaagtgttttatgtcatgaagcagactcatttttccatgaatcacgggattcaggcgctggatacgtatatgaaacacgatttctacagagtgcggagaattcaatgccatttcgtcatctcaggaaactacatcgactgcaaaaactacgacaaagcgcttgagcatttagacgaagccctccgcctttctttgcttgaaggacagccccgcctgatcgggtcttcgctttacaatctggggaattgttattctgaaaagcgagatctgaatgaagcggcccggtactttagaaaagcggttcccgtttttgaagagcatcagcttgaacagcttccgaaggcgctgttcagcttaacgcacacccttttcaggctgcatgatgaccaagcggcccttacctattatgaaagaggggtcatgattgcgaaagaacggggcgatcgattcagtttagagaagtataagtttttacaagcgctttatttggagtcactcaatatggatttaatccatgaagtgtttgactatatgaatgaaaaatcgctgtatgtgtatattgaagatttcgccttggaggccgccgtttacacaagcgcacatgagcaatataaagaagcggcgtatttttatgaaaaagcgattcgcatgagagaaaacattcaaaaagaacaatgtttatacgatatataattttcttaaccatctgatcagcagatggttattttttttatgcacattataacgtttgaccatagaaaaaaacggaaaaatcgcaaaagagagaaaaaagtatgatgggaaggagggatttgttgttcggattcaatgatatgataaagtttttcgtatcatttctcatcattctgccgatggtgtctgtcatccatgtgtcgggacacagctttatggccatgctgttcggaggcaaggcatcattggatatcggaatggggaaacgtcttttaaaagtagggccgattcaggttcggcgtatctacttcatagattctttctgcaagttcggcgaattgcggatagataaccgtctgacgagcgcgctcgtctattccggaggctgtctgtttaatctcgcttctatctttttaataaatctgctgatcataaaagatgtcctcgagccaaacttatttttttaccaatttgtctatttttcaacttattatgttttctttgcgcttctgccggtgcaatacggggataataagctgtcagacggattggctgtttacaaagtgctccgctacggggaacgctgtgaaatcaataattgagagtttacatgtttgctatcaggctgaaagggaagaaaacaagtacacagaacaaaaaaggagctgaagagatcatgagtcaagataacggtttaaaagacaaagtaaaaggcggcatgaacaaaatgaaaggggaagcaaaggacaaagcaggcgacatggcaaacaagtccgacttaaaagcggaaggtaaaaaagacaaagcgaaaggcagcctgcaaaagggtgtcggcaaaacgaaagataaactcagtgatgattaatttgatagtgaaacacagcaaaagcccaaaatattttgggctttttgttatgagaaatgacaaaaattccagttcatttggttaatattcactaaatttttaaatattctataaattccccggcgatttctttataatattcacatagaatgtaacctttcttcacatttgattaaacgtttgttgaagaaaaaaatgagaaatcggtaatttctgcaaaaggaatcgggccgttcaccgtcgaataacttttatcacttaacatttcatgaggtgaagggggtgacggccgcctgcatcgtttcggtatgaccatgcggattgtgtttgactatcactaagggggaatacagatgaaactgacaccggttgaacaagaaaaattgcttatttttacggcgggagagctcgctaagcagcggaaggcgcgcggcgttctgctgaattatcccgaagccgccgcatatttgacctgttatctgatggaaggcgcgagagacggaaaaagcgttgctgagctgatggaatccggccgcaatgtattgacggaaaaagacgttatggaaggcgttccggaaatgctggacagcattcaggtggaagcgacgttcccggacggggttaagcttgtcaccgttcatcagccgatcaaagcggaggtgaagtcatgaagccgggagcgattcaagtcgcaaaggggatcatcaccattaacgaaggccggaagacgctggaggtgtcagtcaccaataacggaacacggtcagtgcaggtaggatcgcattttcattttgccgaagccaacggcgccctttccttcaatcgggacaaagcaatcggcatgcgccttgatatcccgtcaggcacatctgtccgttttgaaccgggagaagagaaaaccgttacgctcgtggaaatcggagggcgaaaaacggtcagaggtctgaacggcatggccgatacgtatatggatgagcggggaaaagagaagactctgtcaaatcttaaaaaagccggatggatggaggaggcgatccgatgaaaatgtcacgtgagcaatacgcagaactgttcggaccgacaacgggagacaaagtcagactcggagatacggatttatggattgaagtcgaaaaagatttcacgaattacggtgaagaaatgattttcggcggagggaaaacaatccgggacggcatggggcagaacgggcgtatcaccgggaaagacggagcgcttgatctggtcattacaaacgcggttatcctggattataccggaatcgtcaaggcggatatcggggtgaaggacggccggattgtcggcgtcggaaaaagcggcaaccctgatattatggatggggtggacccgcacatgattatcggtgccggaacagaagttatttccggcgaagggaaaatcgtaacggccggcggggtggatacgcatatccactttatctgcccgcagcagatggaagtcgcgctttcttcaggcgtgaccacgcttctcggcggcggaacgggtcctgcgacgggaagtaaagcgacgacttgtacatccggtgcatggtacatgtcgagaatgctggaagcggccgaggagtttccgatcaacgtcggtttcttaggaaaagggaatgcatccgataaagcgccgctgatcgagcaggtggaagcaggcgcgatcggcctgaagctgcatgaagattggggatcaacgccaagcgccattaaagcttgcatggaagcggcggatgaggcggacattcaggtggcaatccatacagacacgataaatgaagcgggctttttagaaaatacgcttgatgcgatcggcgaccgggttatccatacatatcacatagagggagccggcggaggccacgcaccggatattatgaaactcgcatcttacgccaatatcctgccgtcctctacgacgccgacgatcccgtataccgtcaacacgatggacgagcatcttgatatgatgatggtctgccatcatttagattcaaaagtgcctgaagacgtggcgttcagtcattcacgcatcagagcggccaccattgcggcggaggatattctgcacgatatcggcgcgatcagcatgacgtcatctgactcgcaggcgatgggcagggtgggagaagtgattatccggacatggcaggtggccgataaaatgaaaaaacagcgcggcgctctatcaggagaaaacggcaatgacaatgtgcgcgccaaacgctatatcgccaaatacacgatcaacccggccgtcactcacggcctgagccatgaagtcggttccgttgaaaaaggaaagctcgccgaccttgtactatgggacccggttttcttcggcgtcaaacctgaacttgtgctcaaaggcggcatgatcgcccgcgcccagatgggagatccgaatgcttccattccgacgcctgagcccgtgtttatgcggcagatgtacgcatcatacggtaaagcaaaccgaaatacctctattacatttatgtcccaggccggtatcgcaaacggtgtgccggaaaagctcggccttgaaaaaatgatttctcccgtacggaatatccgtaagctgagtaagctcgacatgaagctgaatgacgcgatgccgaatatacaagtcgatccgaaaacctatcaggtgttcgccgacggagaagagctggcatgccagcccgtcagctatgttccgctcggacagcgttatttcttattttaatccctcttcggccggtttcccgccggcctgtttacacctctattgccaacttgatttcatcctgccgcccgttttagtgtatattagtagttgacaaacaaatgaaatgtaactattgcggttacaacggtggtgaaaaacatgattaacagccgtcttgctgtggccattcacattctatcgctgatctcaacggatgaacgggcgtcatcggatatgattgcgggcagcgtaaacactaatcccgtcgtcgtgcggagaacgatcagccagctgaaaaaagcgggtattctgacatcccgagcgggtgttccgggagccagcctgaaaaaagatccgtcggagatcaccctcttagaggtttacagggcggtgcagaataaggaagagctttttgcggttcacgacaatccgaaccccgactgtccggtcggcaaaaatattcagcgcgcgctcgatgagacgttcggaagcgtacagcgggcaatggagaatgaacttgcgagcaagtccctttatgatgtaatgaatcatctcttttgttaaaaagagatgggttcatgccgctataggtgtaacaaaaatggttacaagttataatgaggaaatcacggttttggctccatattcagacaagcctggatgcggattgcgatctgtttaatgaagaaatccttcgaaactaaaggaggtggttaccgggatatttatattttgcttaagacttatgtgaaggtgtcagctgtgagctagttaaacaaaaaatgataccctgcctccagcaatgccaaaaccgttcgcctcttaacaatcattgtaaaatttctctaggaacgatcagcagcccgttagctgcccctaattaaagatgagctgttaccacactgttacattagaacttccgctgcttttatatccttctgtcgctaagacttgataagcccaattactgcccagattcattccatggctcttccatgcgttaacatgattgctgaaagtgattgcagcgttgcttccggtcggtctcttcgactggcgaacactccagtactgcgtaaaagtagtgttatcgccatcaatggaaggtgcattataacgtgtcgttgtatatatgtcatatgtacctccatcactgtttacagtccctttatacgttccggtaggtctgtaagtaccccatgaatccactacataatattcgatgagaggtgctctcgtccagccatataaagtcaaatatccattgccattcggcgcccagactccggcattatagtttattgttctaaatggcgagcctgtagtccagcctttaccaacaacgaaatttccggtattagaccaattaacactgtaattcccgccagatccattgactgcgtttactgttccgcccccatcagtccaattttgccagtaatctgtaccagctgcagaggcggttgccgaaaacatgctgatactcatgaaagctgccgttaatccaactaagaatttctttttaaacttaaacatatgttacctcctatactattttttctgactttgacatgaggcagcactcgtaaatatttaacgaacgccaacgcttttgatcgttcctttcaatataatagcatgaatacatgagtgaatattaagaacaattgtaatttaattacaaagacccaaaaaactgtatgataagtggtcttgttccatcagggcttttatccttattttgcagaatcacaattcttgcttctaaacctgatcaggaacagtcgaacaattgagtgatttcagttgaaactctgaggaaaagctttatttgaataaacttttttgagctgaagccggaatgtctgaaagaatatttgcagacagctgcatcagctgcgccattatgccatcgccgtattggcaaatccgaagcacaaaaacgaacgctttaccgttattgaagaagcggaataagaaaaaatcccgggcggatgcgccgggattttcctttttaatatgtattggcatcaatattattaaacacgccgtccacgatgccgagcgtcatgaggacaatgaagagaacgataccgagaacggacaagccgaccgtcacaatcaggtagatcccctgcattttcacgaactttgcataattctccagcatatgttcctctgtcagttcattgaactgctccgccatctgtcccgcttcatttgccgagcgcatcagaaaaatgccggcaatgatctgcagaacgccgggaatggctccgattaaaaagaaaaacgcgcccgacagcgccgcaaacgcacccacgataataaataaaatacctgtcgcttttccccatttcgaaatagaaataagcgaacgattcactgattcaggtttcaaactatggcactcctttacaaaaaaatactcacttttcatttatacactattcggtcattcttttgaatataaaatgtgttttttcatgccgtgtccgtttttatatcagaaaattcccgagaaaacaccccgggaattacaaaatcggcgaaagaagtcttgaaatcgattctttaatgcggatccgcagcgaacgctcctgatattcttcatacgtatattttctggagacgagcagatcttctttaaatgaggaaatgagttttttcgcaatggtgacgtcataaataaaggcgttgacttcaaaattaagtctgaagcttctgacgtcgatattcgccgtaccgactgaagccgtctcatcatcgacgacaatcgtttttgcatgaataaagccgttatcgtaaatgtagactgaggctccggctttcaaaagatcgccgatgtaagataaagtcgcccagtaaacgaaagcgtgatccggcttgttcggaatcatgattttgacgtcgatgcctgacagacaggcgatcctgagggcatctaaaagacttgagtcaggaataaagtaaggcgtctgaatcaggattgaccgtttggccgttgagatcatcttgatatagccgtttttaatttgttcccattctgagtccggtccgctcgtgacaatctgcatcccgacgttgcccttcggctcgcattccggaaaatgattcggaacgtatgtgagcgtatgatgatgggaggcttggttccaatcgaggataaaccgtgtctgaatggcgtgtaccgccgtgccttgaagcctgaggtgcgtatcgcgccagtagccgaatttcggattcaggccgagatattcatctccgacgttaaagccgccgacatagccggtttcgccgtcaatgatgacaagcttgcggtgattccgataattgagccgcaaattaatcggacgaagcctggaaggaaaaaagacttccacatggccgccggcgtcccgcagcggtttgaagaatttttttctgagtgatcttgaaccgagttcatcatataacactctgacttttacgccttcacgtgcttttttcactaaggcatcgcgcaatttttttcccagttcatcacctttataaatatagtattgaaggtgaatgtgatcttttgcgttggaaatgtccttcattaagcgtttgaacttatcgcgcccgtccgtcaaaatctccaccgaattatcctctgtaaagaccgcgtggttgttcatgacaagcatatagatgaggtctttattatccacagtcgccctgttgttaaattggaattgcctcgacttcagatctttcagctgaaacttcagcagcttttctatcccgatttttttacggtcttcccactgaaacagatgcttgcgtctcaggttatggccgaataacaggtataaaataaaccctaaaatgggaataaaaaaaagaaccaagagccaagcccatgaagcgctggcatcgcgtctttctttgaaaatcatgatgacggccaaaagtatatttaaaacgaaaaaaaatccgaataaaataaatgaaatgctcactttgcaaccccgctatatcatatttatcaagactgtgcccattagtattccgacaagtgcagcaatctgattcccatttcaaattataacattgacattttgaaagaataaagagccggaatcaaagatgaatgcagttttctttcaaagaaagttccgagtgcggtaaaatatgcatatatgaaaaagaagacaaaaatgacagcaaaggggagagggcatgaagctggagcatgcggaacaattgccgggattcataaaaaaagaaattcagaaaatacaaatcgccatcgcgccgctgatgaaaaaaagcatcatttaccgttttcttgctttcccgctcgccgcttttagtctgtttcatctggcatcgcttttgattcaggccccttccgggagaggagctctcgtatcggccggcatttttgccctccttgcggctctgggtcttgcgttttttaaggaagccggccatcagcggaaacaggtgcaaaaaacgatccgcctttatatgctgaacagaatcagaaaaagcgacattctgtccgaggaacggaaaagcgcctatacccggctgattgccgaggagccgtctgcgatgaagagctttattgaatttttaacggaagaagaccggaaaaaagaaatgctttattaaaaaagagctgacacgcgatcagctctttttgtcattcaaacaccgggtcgttctcatagtaatatgaatcaggcgtgtcatacgtatcagtgctgtgataagcgataattccgatgacagcgaagatgacgactaaaataaaagcgagaatgcccaataccacactggatgccgcgtaaaaaaactgcattttgataaatgacgcgtaatgtgcaagcatattttcttccgcgttttcttctagtccttcctgaagggcggcagccgcttttgccgagcgcatcagcatgacgccggaaatgatgagcagaacccccggaatggctccgagcagtgtcacaatggctgacagagcggaaagagagcccgtgatgatcagaaacacggcggtgatctttccccatttggcgatgtcggcaagggaacgggcttttttattgagcggctggttttcgtctttctctttatcgatggtgatcatgacagttctctccctaaaatgttcaagtcatatcgttttccgtccatttcggcgatacccgggaatacgccccattcggtaaaaccgaatttttcaaacagcttaatgctcggcacattatgtccgaagataaaagccatcaggctgcggatgccgattgccggagcgagtgccagggcttctttcagcaaaaagcttcctgctcctttgccgcggcaatcctgatgcagatagatgctgatctccgccgttttgtcataggccggacggccgtaaaacgtttcaaagctgatccaggccgccactttgccggtttcatcttccgcgaccatcagcgggcgccggtccgtgtgccgcaaaaaccaatccatccggtcttcgggcgtcacttcttccgtatcagccgttaccattcgtgaggcaatcgtcgagttgtatatggccaccaccgcatctaaatcctccaatacggctttgcgcagggtcaaattcatattccgggatctcccttcacattttattacataatcaagtgcaatctgcacatactatttccaaaaaagttttttatggatgtgtatatattttcagaaaagtgttcagaatgttgctgaggtgatgaacaaatgagagaggaagaaaagaaaacttctcaagtcaaaaaacttcagcggttttttcgcaaacgctggatattccctgcaatctacttagtcagtgcggccgtcattttaacagctgtcctttggtatcaatccgtttcgaatgatgtgaaggacaatctgacgaacaacggaggaaactccgcgtatgacagcggcaaagacgatgccgtcgaagtaggcaagtcaatggaaaacgtcgcaatgccggctgctcattctgaaaatgtttctgttgtgaaaaagttttatgaaactgatgccgcaaaaaaagagaaagaagcagcacttgttaactataataacacgtacagcctcagtaaaggaattgacttagctgagaaagacggaaaatcatttgatgtttctgcttctctgagcggtacggttgttaaagctgctaaagacccggtactgggatatgtggttgaaattgaacactcagacggcctgtctactgtctatcagtctttatctgaagtcagcgtggatcagggcgacaaagtaaagcagaaccaggtcatcggtaaatccggaaaaaacctttacagtgaagaaagcggaaatcacgtgcactttgaaatccgcaaggacggcgtagcgatgaacccgctcaattttatggacaagccggtaacatctattgaaaaagcggcggctgaagagaaaaacgctgtgacagaagaaacggaagggtcaattcagcagtcttccgagaaaaaagatgtgacgcctaaaaaagaaaccgaagaaaaaccaggtgacaaagaggacggcacaaaagacaagacagatggtaaagatgacggctcaatgaaagattcgggcaagtaatcttgatcccaaagcgcctatcagctcagataggcgcttttcatattgccgcatgtgcctttatactagtagaaaacgaaggagatgctgaatgaataaatgtctggcggccgggtggctcgtctttgttttcgtttcggctttgacggaaagctttcacgatatgattgtgtcacagacggtgtccttccgtttcacgccgcatccggatgtgtccggtttctttgtgttcgatatggcggagctcgccataccggaagcggcgattcaaaagctcgggcacgcgttttcattttttgtgctcgcctatttgtttttcagagagcgcaggcgcatgaagagggcggtgctgtatgcattggccgccgctttcctgacagaaatcgtccagctctttttcggcagaaacggatgcctccgcgatgtgctgattgacagtctcggcattgccgcattctgtgctttacaaaggaaaaagcatacagccaaacatacaaaaaccggcagtctgtgacagacgccggctttttttatatattatggtttgtcgatttgcttttatgaacgatactttcatagattcgcacgatcagatcgacaatcggacgaagcacatttgaaaatctgaacagcaggaatccgacaatgagggaaacgataatgcttccgagcacatcgatcggataatggtggccgacccaaattcttgagaagccggtcaaaaggccgaaaatcacaagcggccagccgagttttttgttgcggaacagaatcgcaattgaaatcgccaaagcgcctgtcgtatggtcactcggaaatgaagcatccgcggcatgagggatcagcgtatgaaccgtatgttcgacaaaggggcgcggctcgacatagactttcgtgatgaggtagttgacgataagcgctgcaacacccgtgaagcccgcgtacagggcgttttgtctgccttttgtgcttccgaacagccacatggcaagcaggaaaagggcgtaggcgtaaatggcgtattccgtaataaataccatgatagagtcgagaatggcactatggtgcgacaaaccattgatcgctttaaatagttcgtaattcacaaatatcaccttttatctttattttatatgaacagtgtaatgcttttttctatgagacacaattggtattaaaaataatcataaaaaagtaaacagaatgaaacgtgactgtattactgtgcgtcaagtatgcgggaaaagaatagccgaaggagttttgtccgttgctgaaacgtttgaaaaacgccgatctgccgcttgtgtttgtcattatgctgctttgcggattcggcttgttaatggtgtacagcgccagtgatgtgatggggtctcagcggtacggagatccatcctatttcttccataagcagagtgcctctttactgatcggattatgcttatttctatttgccgcctgtctgccgtataagcggtatgcgcggcttgtaccgctgtttgtggtcggttcgctggtattgctgctgctcgtattgataccgggaatcgggctggagcggaatttttcccgcaggtggctgggagcgggcccgcttgtcgtacagccgtctgaattggcgaagatcgcgatgattttgtatttcgcttcgatttatacgaaaaagcagccgtacattcatcaatttgtgaaaggggttctgccgcctttagtgattttgggaactgcttttctgctgacattggcggagcctgatttagggacggcttccttaatcctggcggcgtgcgggtcgattttattatgtgccggcttgaaaaagcgccatctgttcgtgctcggcgcgacggcggtgtcgggggttgtttatctcgcattttccgcttcctatcgtgtgaagcgcctcgtttcctttaccaatccgtttggtgacgcgaatggggacggctatcagctgattcaatcctattttgctatttccggaggcgggtttttcggaagagggcttggaaacagtgttgaaaaaatgaactatctgcctgaggcgcataccgatttcattatggccgtgatcagcgaagagctggggatattcggtgttctgatcgttttgggattatattttgcgttaatgcttctcggcgtaaaaacggccgtgcgggctgatgacccgttcgggaagcttcttgccatcggaattacgtttcaattaatgtttcaggttgtattgaatttgggagcgatgagcggacttctcccggttacgggtgtgccgcttccgtttatcagctacggcggttcttcattaattatgacgctgtttttgtgcggcatactggtcaatatcagtacatatgcgaaaaaacaacccgtacggcataagcggcctgtcccgcatgaaaaaaaggtttcttctttttaatgaagctggaaaaaacgcccgggacatttctgtctccgggcgttctgcctgtttataaagctcctggtccttcttctccggtgcggatattaatcgtgtttccgatttcatagacgaatattttgccgtctccgggctctcccgttttcagcacttttttcgccgtttccacgacttgatcaacggggaccttgctgacaacgatttccactttcagccgttcatacacattgctctcaattttgactccgcggtacagttcggtgtgggctttttgaaggccgcagccgtgtacgttggagaaggtcagcgatgtgactccgattttaccgagttcctgtttcaatgtttcaaacttagccggacgcgtaacgatttctaccttgaacatttgaccgctcatctaagccactcctcactttataagtcctgatatgctttttccccgtgcatcgttaaatcaagcccaagtgactcttcttcttcactggcgcgcaggggaatgaacagacctacaattttaatgataacgaaagtgacattaaatacaaatacataggttgccgcaatggccgcaatctgcttccagagcagtcccggatcgccgtaaaacagcccgtttgccccgccgtcattgacggaagtggtggcgaataaaccggtcgcgatgccgccccatgtcccgccgatcccatgcaggccgaaagcgtcaagcgcatcatcataaccgaaagtctttttgagccaataaacgccccaaaagcagacaagcccgccgatgaaaccgattacgatggaagagaatggcgtaacgaacccggcagccggcgtaatggcgacaagcccggcgattgcgcctgatacagcacccagcatggtcggttttttattcagcatccattcgattaaaatccagccgataattccggctgcagccgcggtgtttgtgttaatgaaggcaaacatcgcgatactgtcaagcgtgagggcgctgccgacattgaagccgaaccatccgaaccagatgagcgctccgcccaagaacgtgtaaattaagttgtgaggcgaagcagccgtgccgtccttgcgtttcccgagcacaatcgccagcacaagcccggcgactccggaagaaatgtggacgacgtttccgcctgcgaagtcaagagcgcccatttggccgatccagccgccgccccatacccagtgcgcaacgggcgtatatacgagggaagcccataaaaaggaaaatacaagaaaagcactgaatctcatgcgttcagcaaatgctccggaaataatggccgtcgtcagtacggcaaacgtcatttggaacatcatgaacaaggaatgcgggatcgtatcactgtaacttccgggttcaaagccgacccccttcagcccggcccattcaatcccgccaagccatgtattgccgggggcaaaagcaagtgaatatccgtacaaaacccaaacgacggatacgatggcgagagaagaaaaactatgcatcgccgtgctgagcacgtttttgctttttaccattccgccgtaaaacaaagccagcccgggggtcatcagccacacgagtaaagcgcaaaagaacataaatactgtatcgcccatctgcatgttgtattcctccgtctcattcagaatgtaattgtgattaattcattattatagagaaaaaagaacgataaaacattttcatgtaaggttatctgacatggttttttgcgttcataatgctgctttttcaaatgggtgccgtgcgactttatatccataaaaagagcgccggagcacggcggaagaaatcctgtccgggaaagagtaaaataaacggggtgagaaacactaactgcatcaggaggaatcattatgacaacatcattaaatctgcaatttgaaaaaacggctttggtccttattgatttacaaaaaggcattgtgccgatggataaaagcggtaccgttgtgccgaacgcgaaaaaattaattgatgtgttccgggaaaaaggcggatttatcagctttgtgaacgtggattttcatgacggagcggatgcgctgaagccgctgacggatgaagaggcggcgggccattcggctccgccggcggactgggctgaatttgtgcctgacatcggagtgaaagaaaatgattatacggtaacaaaacggcagtggggcgcgtttttcggcacggacctggaccttcagctcagaagacgggggatcgacacgattgtgttatgcgggattgcgacaaacatcggtgtggaaagcacggcgcgagaagcttttcagctcgggtatcagcaagttttcgtaactgacgcgatggcgacattcagcgatgaacagcacgaagcgacactcaagtttatcttcccgaaaatcggcagaagccggacgacggaagaatttatcacacagacaaaatgacaatctccaaaaaaagccgcgtcctgttcttgacagccgtggcttcggggacgatgctgaacccattgaactcgtcgatgatttctcttgcgcttcacagtattcagcatgaatttcacctgtcgtttacaacggtgtcctggctgatatcgtccttttatctggccagcgcggtggcgcagcctgttaccgggaagctcggtgatatgctcggcaggaagaagctgtttttgatcgggcttctgcttgttgctgtctcggcggtcggcgcgccgtttgcgccgacttttatgactttgctgatcatgcggctttttcaatcgatcggaagcagcgcgatatatccgtccggcgtcggattgatccgttcaaatatacgggagaagcaggcttcggcgctggccgtcctgtcaatctttgcatcagccatgacggcgctcggtccgactctcggcggttttctgatcgtttggggagggtggccggcaatcttttttgtcaatctgccgtttatcattctcagcttttttctcggaatgtatatgtttccgaaagatgaaaaacgcgagatcggcggcttgaaaggcgtgctccgccagcttgatacgatcgggatactcctgtttgccggagcgattatccttctcctgtcgtttttattgtccttcagtacgaagcctcactatacagaaggcgtattcgggcttttgtttgtcgggctctttatctggcgcgagctgaaaacagagaagccgtttattgatgtcaggctgtttaaaacgcatcggaaactatcgtcggtgtatattcaatttattttgctgaatatattcttttactgcatctttttcgggcttccgagctattttcaggatgaaatgcatttgtccgttcagacaagcgggttgattatgctgtttatgtcgggcatgagtattctggtgtcgcctctgaccggaaaatggatagataagaaagggcttcttcagccgattgttgccggaacctgcctgaccgcgatcggagcggtgctgttaacgtttttctttcttcaagcgcccatgataggaaaagggctgatcctgtccgtgctgggtgtcggctacggcttcggaaatgtcacgtttcaggcggccatgctgacaacgagccccgccgacatggtcggaacaacgtccggcctgtttcagacctgccggtatctcggttcgattttgtcttctgtcattttgggcattcttttcggaaaagaaattaccgccggccattttcatatgcttgggacgattcttatcgttgtcggcgctgtaagccttttgatggcgttccggttttcggttctcctcaaaaaagcctcttaacaggcgcaacaaaaagagacgggctctccccgtctctttttttgtgtaatgtgctcaaaaatcaaaacgattattgtcgatagcgaccaatgttatttacggaattttcagttatattttttcacatgtgatgtaaggaaaacgtacatgcgggagggagaaaatgaaaaaaacaacgagtgatcggctaagcaataaagatttactgcctttagaagacggcgaacggacatggaaagcggtgaattttgcatccatctggatgggttgtattcataatatcccgacctacgcgactgtgggcgggctcattgcgatcggcctttctccgtggcaggtgctcgccattatcgtgacggcgtcactgattttgttcgccgctttggccttgaacggccatgccggaacgaaatacggcctgccgtttccggtcattatcagggcttcttacggaatatacggggctaacattccggcgcttctcagggcgtttacagccatcatgtggctcggaattcaaacatttgccgggagcacggctttgcacattctgcttttgaacatatggccgggctgggggagtctcggcggagattggaatatactcgggcttcatctgccgggttttctgtcgttcattttcttttggggcattcatctgcttgtactgcggcacggcatggaatcaatcaaaaaatttgaagtgtgggcgggcccgcttgtttatctcgtcttcggcggcatggtctggtgggcgatagatattgccggcgggctcggaccgatttactcacagccgggaaagttccacaccttttctgaaacgttttggccgtttgcagcaggggtgacgggcattatcggaatatgggcgacgctgatcctgaatatccctgacttcacccggttcgccgcgtcgcaaaaagaacagattcgcggccagttttacgggctgccgggaacgtttgcgctgttcgcgtttgcaagcatcacggtgacatccggatcacaagtagcattcggagaaccgatttgggatgtggtggagattttggcccggtttgataatcctttcgttatcgctctttcggtcatcacactttgcatcgccgccgtctcggttaacgtggcggcaaacatcgtgtcaccggcctatgacttggcgaatgtcctgccgaaatatattacattcaggaggggagggtatctggccgccgttttggccctgttcacaataccgtggaagctgatggagagcgccacgaatgtttatgcgtttctcgggctcatcggcgggatgctcggaccggtggccggggtgatgatggctgattattttatcatcagaaaaaggcagctctcagttgaagacctttattcggaaaccggacagtacacttattacaaaggctataattaccgggcctttgccgcgacctttctcggcgcgtttatttctttaatcgggatgtacgtcccggcgttcgccggcatctatgatatctcctggtttgcgggtgtcattttgtcatgtctcggttatacggcgcttatgtatattcatcctccttatgtaaaagcggcaagacgaatcgcgcgggaaagagcggccgaataaaaaaagccgggggctgccccccggctttttgtcatatcattctgcgattgaaacgtttccgtccgcttgaagcggcgttctttttttctggctccagccatacaggagtaaagcaatcaggacgaacagccccgctgccagataaatcgaatggaatccggccgaagcgacgaagaggccgaatacatatgacccgccggcaatcccgctgtcaaagaaagtgaagaaggtagccgtcgcaaagcctgaacggtgtccgggcgagttctgaatcgccagcgtctgcatacacggtacgatagagccgtatccgagaccgattacggcaccggacaagagaagcatgagggcgctgtttgtcatcgccagcatgcaaagccccgcggagaacacgataatcgacggatagatgacgattcccggccccactctgtcaaacagctttcctgtgaaaggacgggcggccatcatcgtcactgcgaaacagacgaagaaatagccgctgacatccaacaggtggatcgtctttgcataaacggataaatatgaagtcacacttgaataacagaaagaaatggacaacccgacaatcgcgattttaagcgcgcctttttcaaacatgtcggagaaagaaaaacggaagacagtcgttccgctgttgttttgatccggcacacgaatcataaaagcaatcagcaagcctaaagaaacaaatacggcaaaaatcgtaaagaaaaccgggaacgaaatgactttcacaagactcagtccgagaaaaggaccgatcgccatggcaaggttcatagacatcgcaaaataaccgagcccctcgccgcgccgcttggcaggaataatgtcagcggcaattgcgcccgtgaccgtcgttaaaatgctgaaccagatgccttggaaaaaacgcagtccgagcagcagatagaaattgtgtagcggcaaatacagataagaagacagggcgaacagcgccaaggatacaatcgtcattcttttcttgccgaaccgttcaataatcgcccctgaaaaaggacgggtgataatagcagataacaggaacaggctgatcaaaagccctccttgcgattcactgccgccaagctcctgaatcatatagataggcagcacggccaaaaatgtataaaagaacacaaagacaaataaattcacgagtacgaccataataaaatctttggtccagatcgagtcagatttactcaaaagtacagcacttccctttcttttctatttcgttaaaaacacattcagaaactcagaaaaagcttccttatctccatcttggaaatccgcaagcatgtcttcctcgaacttcagcatctcttgattgatgctgtcgtatttcaattcagcttccttcgtcaggacgacgagcttttcccgcttatcttctccctgttcccgctgaatccagccgttttcttcaaggcgtttgatcgttctggtaacggtcggcgcctctacgttcagataggaccagatttctttttgggtcatcggtccgatcgtttttaagcaatataggattgaccattgagaggagtacaggccgaatggttccagccgttcattggctttcttcgtaatcaggcgggcgcattgattgatttggtgaatgaggcgtctgttgacgtggatcatttccgttctccttttcaaaaaacttacctaagtaactaattgtgctgtttcattctacagcaggatcgcgcggatgtaaaccccccgatcaaaaagcagaaaattatgacccgccccttgtccttattgagtttttagcatattcccaattcattgctaatacactgttacaaacctatcaaagagagtgtttgaggtgagggatcgtgggcatatttctaaaaccttcttatataatcggacaacgaagaagctgcatcatcagtgaatctgttacagaatacggatctcatttcacacttctcacatccaactggggaggtcgagtggtgtgcacgattacatcaaagagcgaacaatcaagattggtaagtatatcgtggagacgaaaaaaaccgttcgtgtcattgcgaaagagtttggtgtttccaaaagtaccgtacacaaagatctgacagagcgcctgcctgaaatcaatcctgacttggcgaatgaagtaaaagaaatactcgattatcataaatccatcagacatttaagagggggagaggcgacgaaactaaagtacaagaaggatgaaattcttgaaggggagcccgttcagcagccgtagcgtctgacgtctgccgggcccttttttctcctcccgggcggtttcgcgaatatccgcaaaattttgtcaagaacttatatcgttcagcagcttttttttgataaattatgataatatatataattagggcacaatgtggatattttactgtgaaacagatatcaaggaggatataaatagatgtttgcaagggatattggaattgacctcggtactgcaaatgtactgatccatgtaaaaggaaaaggaattgttctgaatgagccttccgttgtggcacttgataaaaacagcggcaaagtgctggctgtcggtgaagaagccagacgaatggttggacgtacacctgggaatattgttgcgatccgtccgctgaaagacggcgtaatcgcagacttcgaagtaacagaagccatgctgaaacatttcattaataagctgaatgtaaaaggacttttctcaaaaccgcgcatgctgatctgctgcccgacgaatattacatccgttgagcaaaaagcgattaaagaagcagctgaaaaaagcggcggaaagcatgtgtaccttgaagaagaaccgaaagttgccgctatcggcgcgggtatggaaatcttccagccgagcggtaacatggttgttgacatcggaggcggtacgacagatatcgcagttatttctatgggcgatattgtcacctcctcttctattaagatggctggggacaagtttgacatggaaatcttaaattatatcaaacgcgagtataagctgctgatcggtgaacgtaccgctgaagatattaaggtgaaggtcgcaacggttttcccagacgcacgtcatgaagaaatcaccatccgcggccgtgacatggtttccggtctgccgagaacgattacagtaaacagcaaagaagtagaagaagcccttcgtgaatcagttgccgtcattgtgcaggccgccaagcaggttcttgaaagaacaccgcctgaattgtccgctgacatcatcgaccgcggcgttatcattaccggcggtggagcgctgttgaacgggcttgaccagcttcttgccgaagagctgagggtgcctgttcttgttgctgagaacccgatggattgtgttgcggtcggaaccggcgtcatgctggataacatggacaagcttccaaaacgcaaactgagctgatgataaaacctcattctgaaaaagaatggggtttttttctgacaaacccttcacgaacgggaatgtaaatccgataataagaaaaaatgctgattttcattatagaacaaatgttccggtgaggcaactggaaataatgctatttcagaggtggaagacttgttaaaaggattatataccgcaacgtccgcaatgattacacagcagagaagaacggaaatgctgtcaaataacatcgcaaacgcgaatacgtcagggtacaaagaggatcaaggttcaatccgcgcctttcccgagatgcttctgagccgaatagaaggcgacaaaaaaacgaaaatcggctccgtcaacacaggcgtatacatgcaggagctgaaaccgttgtttacgcagggaagcctgaaaacgaccgatcagccgacggatatcgcgcttatggagaatcaggttcccaagaatgccgaaacgaatgaaaacgccgagctgttttatcccgtgcagaccgcaggcggcgtccgctattcaaaaagcagcactttctcattaaatgaaaacaatcagcttacgataaacggaaaccttgtgttatcaacaaacggacagccgattacagtcgacaatgaaaaattcaccgtatcagaaaacggaacggtcacgacaaacggccggccggcggggcagattgatatcagaatggaagaagacgtgcgcaatctgaaacgggacggcaatgacctatacagcacggccgacggctctgaactgccgagcgcggcggcgaatccccaagtctcgtattcattaaagcaaggcgtctcggagctttcaaacgtggacgtgacgagcacgtatacagagatgacggaagcatacagatcatttgaagccaatcagaaagtcattcaggcttacgataaaagcatggataaagccgcaaatgaaatcggcaaagtgtaacaaaatgggggacattcaattatgatgctcagatcaatgctgacggcttcaacagccttacatcagcttcagcagcagatggatacagtcagcagcaacctttcaaacagtgatacgacaggctataaagcgagggactcccgcttttccgagctgatcagacagcagtatgaccacatagatgacaaaaaggaaaattcgccgaacatgcggaaaacgccgcccggcctgcgtctcggcgccggaacggtgatgactccgcagctggactcagggcagggaagcatcaaaaaaaccgaccgtgaccttgatatcgcgttcacatcaccttatcaatatcttcaggcagaagcggacggacggcgggtgtatacaagggacggctcactttccctcaagccggccggcggaaatgaccggctgcttcagctgatgacagcgggaggcaatcccattctcgatgagaacggtcagcccatacaaattgacagttcgctgactcagctgaaaatcagcaaaaccggaacgctgactgcttcggaccaggcgggaacccgttcgcagacgtttaatctcggcatcgtcaatgtcaataatcctcaggcgcttcatgcggaaggggataatctgttttccgtaaacggcgcgggggcttcagcgattgaagagcttaccggcgcaaaccggcaggcaatcggtatggagcagggcgcgcttgaaagttcaaatgtcgatatgtcaaaagaaatgaccgacttaatcgtgtctcagcgttcctatcagctgaacagccgcacgattacattgggagaccaaatgctgggcttaatcaactcagtgagataaaagaaggggcgttttgatcagccgcgcatgataaaaaatgcggctttctcaaaatcgcccttttttttgtagtaatcagtaatatcctgaagcagcacttccaaatccacccacgcttcaattttctgcaactccagcacaagcttctgcaatcggtcgtacgggtcctcctgagcggtgtacagtatgttgagcgcggtcagcttcaatttcataatcttgttctgcactttttcagatatgtataatcctttctgcagcacggtttgtccttcggcggcagagccggttttaaaaagtgctctgaccgcttcgtacacacaatgaaggtaggaaacgggagactctttctcgaaacgctgattgcccaatacctttttgtaaaaagggagggcctctttatcttttttctgggcggtctttaaaaaaccaaaattataataggcgtggcacagcaggttattgtcattgatccggtccgttatctttatggattcattgaagagctgttctgcgtcgtcatagcgtgcctcgtctatataattcacggcgagaagcagccggcagctgagcgtttttttgatgtagccggcttcatcttgatagatttccagcgctttattgacatattgaatggagagcgcaggcgacttcatcatgtaatatgcacccgctgttttataataaaattcagcggcttcgaaacggtcctgaatggccggcaggtactgttcagcttctttaaagcggcagacagcacggttcggagcgccattcaccatatggaataaccctttgaaaaaatagaaataataagttaattcatgatccatctcatctttgcgccgcttcagctcgcagaacagcttattcagaccgtcttttttctcaaacagcagctgaaaccgtgcgaaaaacagctgatatctgagtttgagctttgcattcttttgtaatttggggagatgctgattgatttgttcgtgaagggaacgggctagatcgaattggcgttttcccatggcgtcataccactcattcagcatcaccagcgtacgtttttcagtaaacttagcaatcatcttccaacctctttgcatagggtaaaagtctttatttatcataacacattaatggacgaggctcattgccagctggttacagtttacagcgcggttgaaaaagaaattgattcataatatacttccaaatgtacagattggtgccacatatgccttctatacatactattgtcgatgaaggagatgtcaagagaatgcttgatactcagcaaattaaagaaattattccccatcgctatccgtttcttctggtagacagaattacggaagtcgaagaaggaaaacgggcggcgggatataaaaatgtgacggcgaatgaagattttttcaacggccattttcctgaataccctgttatgccgggcgtattaatcgtagaggctttggcgcaggtcggagcggttgcgatgctgattaaagaagaaaaccggggcagactcgcattttttgcggggattgataactgccgtttcaaaaagcaggtaaaaccgggtgacaagctggagcttgaggttgatattacccgcgcgcgcggtacgatcggacgcggcaaaggcgttgccaaagttgacggcgagctcgtgtgtgaagctgaattaacttttgcgctcggagaataaaagcaaacaaatgggcttataaaaaagcccattttgtatagaaaggggtgaatgtgatgtggtcagaatttaaaagctttgcgatgcggggcaatatcatggatctggctatcggtgtcgtcatcggcggcgctttcggcaaaatcgtgacgtcgctcgttgaagacatcatcatgccgcttgtcggcctgcttcttggcggtcttgacttttcaggactggccgtgacattcggcgatgctcatatcaagtacggaagcttcattcaaacgattgtgaacttctttattatttcattttctatttttatcgtgatccgcacaataggcaagctgagacgtaaaaaagaagcagaagaagaggctgaagaagccgaggaaacagatcagcagacagaactgctgactgaaatcagagatctgctgaaacagcgggctcctcacaatgactagtgcacaaaaaaaggctggatgattaacgtccggcctttttcatgatcataatttttgtttaaacgcttcaatcagccggctgcccgagtagccttctttcacgagcgactccagaatgctttctgatccggggtggtttcttgacaccatttgaccgtaaattaaaacttgtatacttctttccagctcgacgatatttttgatgcttcccgtcagctgggcggggcggttgctttttttcgtaatcgttacaaacaccttcgcttctttctggcttttcatcagcatgtcaaaaaaagacaagtgttcggccgggaccagtgcttcaattaaccagtgattttctccgtcctctttattgataatcaatccgtctaaaaggggaaactgctcaatcggctgatcgtctttatctaaacgttccacattcagatcaaccagtttaaaggttttcatctcttattttcacccctgttgtccatgtttttcgttcatttattataacacatatcatttttcccgggaaaatgctgtaagacatgcttcatcatttttgtaggcggtcaacatttaatcatttctattttttcattataatgtaaaagaatatggtcatggagagatgcttatgaatcaattgcgcctgaaggaaatctatatagaagacggttcaaggcgaaaagacgatcattcctacttggtatgcaaaaaggaagattgtgaggtgcatcttaacagaaggggaaatgtcgtctttttatatgaaacaaaagaccgcatggaacagtataaaattcagctttcactgactgataaaaagctgagtttttactggttcgcatgggacggcggaaagtttgtccgcatgtttgagaaagactggctcaaaacgaaacttttctcgcggctgctcaaaaatacatattacataagcggccaaaaacaaaagttttttttatcagaaagaaaaacgaaaacataagagcagcctgaacggataacggctttatccgctttttgctttcacgagcccttgtactacaatgaagccagcctcgaaaaagagaggaggatacggcttgtttaaccacgttatgcttgtcggccggctgacgaaagacccggagctccgttttacagcagcgggcattcccgtcgcgcatattacgttggcggtaaaccgcaattttaaaagcgcgtcgggtgaaaccggaaccgacttcgtcaactgcaccatctggagaaaaaacgctgaaaacacggcattgtactgccaaaaagggtcaatggtcggtgtaagcggcagaatccagacaagaagctatgaaaagacagacggcgtaaaagtttatgtgaccgaggtcatggctgataccgttcggtttatggatcaaaaacagaaagagcaactggctgaatagcattcttttttcctcgatttcccgcctttcagcgggccccgcaatacctccttcccactcgccagtcgaaagactggtttttttgtgcgggagctaaaaaatggttaaaaagaagtgatttcgcttatgaatacttaaaaacattgaatatattgggataaaaacttataattacttacagataagtgacgaaaaagggaatgaggacgtgtatcaagaagaaagactgattgcgataatggaatatttgaaacagcatcggcggatcaccgctgaacagatatgttcgctgcttcatatttcaagagataccgcaagaagggaccttgtaaagctgaaagagcgcggggccattatcagaacacggggcggcgcgattctgccgtcggtgaatcaggaggttcctggctattcgggccggctgaaaaccgtttctgaagagaaaaacaaaatcggcaagctggccgcatccctgatccataaaggagaccggatcatcctggacacctcgacaaccgtgcaggcctgcgcggagcatttaaatgtcaccggctgcactgttattacaaattcgatcaatcaggccgatatcctttccgcaaaagagggaattgatattcacctgctcggcggaaagctccagaaggaacaccggtttttatacggggcttccgtcgtagaaaaactgggggattatcacgccgataaggtgctgatcggcgttgtcggcatctcggaaaacggcctgacgattccgcatgaagaagacggcatggtaaagcgtaaaatgatccgacaggcggaacaggtgattgcgctgagcgatcactccaagcttggccgtacgagtttttatcagtatgcagctctgcatgagattgacctgctgattaccgatcagctgcctgatcaggatttttgcgatctgctcgaccggcacggcgtagaattgcttgtaactgaatctgaagaagaggatgaggacatgtgaaactgattgccatagatctggacggcacactgctgaacagcagtcatcaagtaagcgatgaaaatgagcgggctttaagggatgcccggcaagcgggaattgaaatcgtggtttccacgggacgcgcgcattttgacgtgcactccatattcgaaccgctcggcataaaaacatggattatcagcgcaaacggagccgccattcatgctcctgacggcagcctgtaccactgtgatgcgattgaagaaacaagagcccgcggcattttgtcatggcttgaagagaatcaatattactatgaggtgtttacaaacaaagccatctatacgcctgaaaccggcaggcagctgctcgatatcgaaatggaccgggtgaaaagcgccaatccggaaaccgatctttccgttttggaacaggcggcttcagtgcaatacagccaatccggctttgcttacattcattcataccgtgagctctttgagaaagaagagcatctggatttttataatattctcggattttcgtttgatgagcggaagctgaaagcgggctgggaccgattcagcggtcagaaagatctcacccttgtcagctctgccgatcacaacttcgaactggcgtctcgaaacgcctccaaagggcaggcgctcaaacggctggcgcaaaagctcggcattccgatggctgagaccgccgcggtcggtgacagcttaaatgactattcaatgcttcaggcggccggaaaaggcatagcgatggggaatgcgagagaagatattaaggagatcgctgatgccgttacattgacaaatgatcaaaacggcgttgcgcatatgatcaggaatttactgtgaaaggtatggcgatactgttcatgactggcgtgacgcattcatggcaaatgcggcgtaacagtaaggacgacataaaagaccggctcttctgagagagccggtctttttgcgtttaatgtgattgcgccgatgcgctgagggtgaataattcttcaagctcagcggatgacagctcggtaatccaattttcactttggataatctgatcgttcagcgtttgtttcgtttcgagcatggcatcaattttttcttcaatcgttcccgtcgtaatgagtttgtgaacgtggacgaaccgttcctggccgattcggtaggcgcggtcggttgcctggttttccaccgccggattccaccatctgtcatagtgaatgacatgattggcagccgtcaggttcaggccggttccgcccgctttcagtgacaaaatcagcgtcgggtattctttcttctggaaccgttcgacgagagaatcgcgttcctgcttggataggcttccgtttaaaaactgaaccggttctccgaatgttttttccaggaggcgcttcatcatattgcccatctgaatgtattgggtgaaaatgaggcagctttccccttgtccgcggatcaccgccattaaatcaagcagcttttccagtttgacggatctcccgtttaacagctctgtctgttcttccttcaaatagagcgcaggatggtcgcatatttgcttcaagcggccgagcatgctcagaatcagcgctttccgctgcatcccggtcagagaagccatatgttcaaatgtatctttgacaagctgttcataaagggatgcctgttcggctgagagcgggataaactctttttgttccagcttgtcaggaagattaagcgccacttcttcatcccgttttgtccggcgcagtaaaaacggccggattaactgctgaagctggttgattcttttttcgtcacggtctttttcaatcggcagcacatagcgtttatgaaagccggtcagactgccgagatagcctttgttcataaaatcaaagatcgaccaaagctctgtcaggcggttttccatcggtgttccgctcagcgcgatatgatggacgcctttcagctttctgatcgcgcgggactgcttcgtatgcgcgtttttaatattttgcgcttcatcaaggcagatggtgctccatgtcacggaagaaagctcttcctgatcggcgtgcgacaggccgtaagaagtaagaacgacatccgcgtcctgataggccgggacaaatgcttcccccttcggccggcgggggccgtaatgaagcacggcctccagctgcggcgcgaaggtctggagctcacgctgccagttgccgagcaccgatgtcggcgcaatgattaaggcaggcgctttttgccggccgctttccttcacatggagaaaataagcgatcatctgaatcgtctttcccagtcccatgtcatctgcgagacaggcgccgaagccgttttcccgtaaaaacagaagccagttcatgccgtacatctgataagggcggagctggccctgaaacgcggcgctgacttcatgctccggcagatcccgggcatccgtcagtttgcggatcaggcttctgagctgctttgataattcgatcttgatcccggcaaatgccgatgagtcaatgaggtccgtgtcctcggctccgttttccccgtgatccatcagttcgcgcgccagcacgtcggacatgtggaggccctcagattctgctttttccatcagttttttcatttgtttaatgaattgaggatcaattttcacccattggccgcggatgttgacgagacgtctgttgtttgcgacaagctcattgaattcatcctctgtcagctcaattccgtttgtggcgaatctccagttgaaatcaagcagagcgttcatgccgacgaaggactcgccccgcggcgaggatgacactttcgccttgagcatcatattgctgtcccggacaatctgccaccatgatgggagaagaatctccacacccatatcgacaagcgtctcactcgcttccgataagaagatccaagcctcttcttcagaaatcagcgtcgttcctgaatcaaacgaaagccagggaaccgttctgcggaagcggtcctgttcgcgcgcgatttttccgctgtatgcctgccacgcttttttcagtcccttcagtccgtcaaaaaaggtgatggagccggtttttttctcacgtaaaaacatttcgattttccagtcgtcaccgtcgaaatcaggctcgtttaatcggagcccgacggtaaacggcgtcagatcgtcatgccagccgattccctccagaaaatcatcttcatccaaaaaggagcctttaaacgtatgaacggccggcgagcgggtttcgatctgccgccatttttccagcaggtcatcattgtactgaatgtagtcctggaccgcggctgagaaccagtctgccgtaaagccttccagcaaaagctcgcggtctttgaagcgcaggacgccattttgccaagcctcataatccggaagaaaatcgccgtcggcaataaattcgtatatcgtcgaagccgcttcgattaacggttccgtttcctttgtcagctgcacggtgctgaatgaattgaacgagttttttccgagcagctcgacggtcatccacgggctgagcagaacggccggggtgccgatgaagctgacgtcttcaagaaacgttccgtaaaaggttgactcatgccattggaacaaatgagtcttcatctgactgagagtaagcggctgctccttctcatcatggcttgacagcgtaaatgtccaatcttccatttgttctacatgaatgaaaatttccttaagactcgccatcaatcaactttcctttctgcaattcttcttgaagggcgcgcagcctcttgtagcttgcgctcagccggctgatataccgctcccatacctgctgtttctttgcctttttataaagcgtccgcagttttttcagatggcgcgcagcctctttataggcgctgcggtttttttggtcgataaaaaaggccgccgcccggtgataggaggggatgagcgcttccggatcactggcggcaatttcctttaggatgtccttttcgatttcccagacggaaaaaccgacgaggctgtgaatctccacccactccgcgtaccgccgtttttcgtacaggtactggctgtattcggtaaaggtatagggaaggcagccggaagcaaaccgttcaaacagctgatcatcccgtgagtgccgcgcataatccgccaatagcgcaaacagctctccgataatgtcgcgcatttctttaaacggcttatcaagcttcgtatagttcacggcaagcggttcgatccggccataccaagctttcagccgtttccagtcttttttcgcggtgagttcaccgagccattgaaaggtatacggcagcgcttcaggagggaagcgggacatatcttcaaagacagattcatcatctttttgcaaaaaggccagatgaagccgtccgaaccgcacttccggcgaaaaacggcgcccgctttcctgttcgagaatctcctgttcacgcgcaacccatttcggccggttcaaaagcgcgctccacatctcaccgaatacccggaggcgttcgtattgaaaaagctcttctttcacaagcagtctgcggagcaccgggggcgtccggtctaaaaagggatcgagtgaaaaagacaaagcgtacgttttcagtctgtcaatggaggaataaatcgtatccatcagctgttccacgtatggattgatgctgtaataatctttttcggcatccaatctgcctgactcaatcaaagtgaacatgtgaagccagacggcaagcgccgaatgaatctgatataagcttttaagctcgggttttttcggggcgtgttttttgagcgctgacagatagccgtaataaaggccctgcatcgtctggcttccggccggcgtccgcgcctcccacagcgagaattccgaatcaaaaaaagcgagccagcttgacagcgactcttcattcggcagcactttttcctgaaactgccggcggacaagctccctgctttcctcaagcttttctctttccagccaatgttcggtaaaggtaccgacccgctcgaattgggcatatacgtaaagaaaaacggccagcacgtggcggcagatcgcctcagacgggcatgcgcagccgcttttcaccatgaaaaataagttcagcgtgacccttacaggcacaacatcctgcacatatgcggaaatctctgtcggggtttgaacctgtatacgatagacggaatcctgccgatataaaatgagtgctttcttcatcagctgaacattgtcttcattgtaaggaagaagttctttaagctgttcagccgctgcgagcacatcttctttagcaatcatatcctgaagcatgattatcgctcctaacgagtcacaaaataaaaagattccaattcctctattatatcgcaacacatggcccggaaaaagtttttcctaaaaaaggacataaaaacccgaatgtgtcgaatgatgtattagagattgcaaaacagcacccgacagcatataataatcttgttttcaatttaatggaagccgaaaggaaacgaatgatgaagaaaacgaagttagatcaagaggagtttctgaagattttaatgcatgcgcacgacattggtgagcagtcctctgagatgaccacaaaagaaatgcttgagaatttgatttcttatattaaaaatggatatgcaacataaaatcccgcaggctcttggccgcgggattttttaatcttcctgtgacaccagtatttaaagcgcttacaaaaataaaacagattgaagtgattgtctatttttgtcgaattttgtcatttgaaaaggttagaaatgacagtttaaaactgtataatcgtaattggaaaagatcattggagggaatgggaatacgcggaaagtgatatggaggttatatgggagaatctacaagcataaaggaaatattcgcaatactgagaaagcgtctgctgtttatacttattattaccgcggcggcatctgccgcaggcggactcatcagtttcttcgctcttacgccggtctatgaaaactcaactcaaattttggtcagccaatccaaaaacaatcaaaaagaagtccaattcaatgacgttcaaaccaacctccaattaatcaacacgtataatgtcatcatcaaaagtccggtcatcctcgatgaggtgattaaacagctgcatctgtccatgacttcgaaagagctggaatcgaaaatcacggtatccagcgagcaggattcacaagtcgtgacgattgccgtgagggatacggatgctaagcgggcggccgttatggcaaatgcggttgcagccgtttttcaggacaagatcatcgccatcatgaacgtggataatgtcagcatcctttcaaaggccgaagcggcggacagccagtcaccggcagagcctaaccgcaagctgaacatcgcgattgcgtttgccgccggacttttgggcggaatcggtctcgcctttttgctggaacatctggataatacgatcaaatcggaagaacagctggaatcgctgctcggcatcccgatcctgggaacggttacttcaatcagtactaaagacagcgttgccaaaaacttgaggatggcggaaaccaaacaagcggggggcggacatgttgacgcgtaaaaaagacaaacccggaaaacgaagcgtgattgcgatgtctgagccgaaatccatcaactcagaacaatatcgcacgatccgcacaaacattgaattttcttccgttgatacggaggtgaagtcccttttgatcacatccgccggtccggaagaaggaaaatcgacaaccgcggccaaccttgccgtcgtatttgcacagcaggggaaaaaagtgcttttaattgatgcggatctgcgcaaaccgacggttcatttcaccttcaaattggataacggaaccggattaacgtcactgctgttaaaacagatgccgtttcagaaagccgtcctgccggctgatgaagcaaacctggatattttaacgagcgggccgatcccgcccaatccggcggagcttttatcgacgggtgccatgaaagatcttctgtcagaagcagccgaagtttatgataaggtgattttggatacgcctcccgtcttggccgtagccgatacgaaaatattaggcagctacactgacggggccattatggtgatctcaagcgggaaaacggacaaggaaaaagcggccaaggcgaaagaagcgctcgattactgcccgtgcaagctccttggggccgtgatgaacgggaagaaacaaacgaaacactcggactacgcctattacggacaataatgtcataatgggcgcggtccattctttttaaggagggattgaaatatgatagatatccattgtcacatccttccttccatagacgacggcgcggcggatgatacagaaagcctgaagatggcgagagaagcggtcagacaggggattgatacgatcatcgcgacgccgcatcatgtgaaataccgctatgacacggaccggcatacggtcaacgaagcggtcagcctgttaaacaaacgtttgaacaaggaaggcattccgctgactgttctgcccggccaggaaatcagaacagacggagatctgctggcaggtcttcaaagcggctcgcttgtcccgctccataatacaaagtatgtgctggcggaatttccggcggatcatgtcccggcctacgctgaaaggctgttttatgaactgcagctgaacggatatgtccccgtcatcgcccatccggagcggaacagggaaattcgcgaaaacccttccgtcctatacagtcttgtgaagaaaggggcggtcgcccaagtgacggccggctgcattgccggagcattcgggcggaaagcgaaatccttttcgctgcagctgattgaagcgaatttgatccactttctcgcatctgacgcccataatctcggaccgagaaatttttattatcaggaggcgctcggcgttctgaaaaaagaagcaggggctgagctgatttacatgctcgcggaaaatgcggcgcttctcgctgaaaacaaagccgtttataaggaacctccgctgcctgtggcccgccgtaagcgctggggtcttttttaatcgtcgtctccatcccgtttaaatgaagcgtaagcggctgttttgcaagatgattcttttatgcttatgctattatctagcggccggcgccgttttttcctatcatgacctcaggcttccggcattcagccggcgccggaatcatatgataataacggtaagctgcccagcagcaatttctaaacggttgggggaacacgatgaaaataacagtgatcggaacaggctacgtcggtcttgtgacaggagtgtctctttcagaaatcggccatgacgtaacatgcatagatattgatgaacgtaaggttgagcagatgagaaagggattgtcccctatctttgaaccgggacttgaagatatgatgaaacgaaatatcggccggcatcggctggcatttgaaacgagctacgaaaaagggcttgcggaagcggacgttatttttatagcggtcgggacaccgcaaaaagaagacgggcacgcaaaccttacttatattgaaaatgtcgccgaacggattgccgaacatatttctaaagatgcgatcgtcgtgacaaaaagcacggttcccgtgggaacgaatgacaggatcagcgaagttattcattcacggctgaaagcggacgtgaacatttcaatcgcctcgaatccggaatttctccgtgaaggttcggcaattcacgatacctttcacggcgaccgcatcgtgatcggggctgaagaccggcagacgcgggaaacgcttgaccgggttttcgcgccgcttgcgattccggtatatcatacggacatcagaagcgctgagatgatcaaatatgcgtcaaacgcatttttagcggcgaaaatcagttttattaatgaaatttctcatatatgtgaaaaagtcggtgcggatgtggaatcagtcgcacacggaatgggattggataaacggatcggcaatcaattcttaagagccggcatcggttacggcggttcctgttttccgaaggatacaaacgccctcgtgcagatcgcgggacatgtggagcatgattttgaattgctgaagtccgtcattaaagtcaacaataaccagcagtccatgctggttgataaagtgctgaacaggctcggcggtgtgacggggaagaccatcgcgttattagggctgtcttttaagccgaatacagatgatatgcgggatgcgccgtccattgtcattgcagatcgtctggcggctcttgacgcccggatgacagcgtacgatccgatcgcttcattccgggcttccggactgcttccggctgcggtttcctatcgggagtccatagaagaagccgtcaggggagcggatgccgtcctgattctgacagattgggaacaaattaaacacttcccgcttgaagcgtacaaagagctgatggaaaccccggttattttcgacgggagaaactgccactcgcttgaggaagcggaacaggcgggcgtggaatatatctcaatcggaagaagagccgtcgtgcctcagactgattctgtcacttgaaaggccggcggaccgcgccggccttttatcatacaatctttagagacgaaggagatatttatcgtggaaaaaacatggaaattgccgaagcaaatggaatcatcccgcggtctgctggaaacgtcagcacggccttttatcaaactgcacgtcaaaaaagctgaaacgggacggtatgacagtaaaattgcaggagacccctattttccgaaacatgaaccatatcctaaagatgaaagcggcaggccgatgaagcttctcgctcaaatcaattttgcggatatgcccagacttcctgattttccggacaccggcattcttcagttttacatatcggtcagtgatgacgtatacggtctgaattttgacgacgggtgcgcgcaaactggtttctgcgtcaaatattttgaacatgtgacagcagaagaagcggagctcatggatgatttttctttcgttcaggttgaagaggagtacgatttaccgattcaatccgaagcgctgatcacccctgagctgtctgctgaatgggtgctcccgtctgattttcaattcaggcagtatgccgggatggatgcctttgactatttcgagcagtttgacgatgaggtgtatgacgaatatacggcgaacgcattcggccataaaatcggcggctatgcgtccttcacccaggaagatccgcggtcttattctcatcaaaaccatacgattctgcttttgcaaattgattcagatgatgacattgattcgatgtggggagatgtgggaatcgccaatttctttatcagaccggaagatttgaagagaaaagatttctcaaacgttttgtacaactgggactgcagttaacgacagtatgatgatcatgatacaaggcaaaggagacggttaatcactgtctccttttttttagggaatttatcatggatacatagaggagatcgatgaatggatatgccgtttatgtgagtcttttggcgttaatgatgagcatctcggctgttgaaaataagccatttaacctatttaagctgctttctgtctattttaaaatataatatatggaaatatagtatggaaaagtctgtgctttttgtacgactttttgcgtaagacgaggtgaaaacagatgagccattcaagcacattaagccatattaacagcacgatcagccataaactgggcgaggttgaacaccaaattgataaattaaaagaagcgaaaagagagatagaatctctgcaggaagagggcgtatctgaaatcagggacatcctcaggccgcacctggaccatcattggaccggcacttttgctgaagaatttgatgaccggcgcgatcaggcccatacagaagcatacagaatcgtcacagacaaatacgacggttatatttaccgaatcggcttaaagatgacacagcttgaaattgaaaaaggagggctccttgccgccagaagcattgcgagagaggcagagcacctgctgacgctgggagaagaagcccttgacacggtcggagaaaaaatacaatcaatcaaaagaagctggagttggttttaatggcagaaataaaactcaaatacggaaccgtcatgaagcagcttgaatccgtcagcagcgctttggaggctgtttcgatcgggaacgccggttcaaacggaaaaaacaagctcgactatacctccaagtaccaatcccgcgaggcaaagcttgtatcgatgatcagcgaatacaagcaggccgttcataagaatatcgcggacgttaaagacaacgtagattctttgaaagaacaggacgaggcgatcgccgtaaaataacgaaagaaaggacttgccgatgagcaaagtgtttgaatcacaatcgttaacggacgaagcagataagagaaagaaacaatacgaagcccttgaagagcagctgcgtgcgctcaaacaagcctttcaaggcgtggccgatctgggtgatgctttgaaagggaaaggcgcagacaatataaaagatttttttcagggacaagcggaaatcgccgacagctggctgacgcttgtctctgctcaaattgcgtttttaaatggcatttcaggtgacattaaagatcaagaactcagcgatacatatgtggagacttcatttttggagcatgagctgcccaacgcggatttgaaagcttcagagattgtctccgctcataaagcagaaatcgattcaattttgtcaggcatcagcgatattattcatctcgacacatatacgctggatgattacgctgataaaatgggcgatgcccagaaaaccagacgtgacacaatcacggcagtcgatacgcttgatgaatccctgactgctgaatatcaaaacttagaatctctggacaacgcagtgctcagcaaatattctgttctcatgcaggccaccagcaacgggaaaagcgcatcccctatgtactatgacaaaaaagccttccacagcaatgaaatctacaaaagcgtcacggcgacagaaaaacagggaacggactatattgacgcaaaagcccagcaggccgaagcaagacggcttcaggaaaaggctgaagaagaagccaataaaccatggtacgaaaaaacatgggacggcatctgcaactttaccggcgaagtcaccggctattatgattataaaagagcagccgaaggtgttgatccggtgaccggagaaaagctctccaccgcagaacgcgtcacagcaggagcgatggccgccgccggattcataccggtcgtcggctgggcgggccgcgctttcaaaggcggaaaagccatttacaaaaccggaaaaaccgtcattgccgcagaacatgctttagatgcctataaaaccggaaaatccttagacattctcaaaatgactgaaatgggcgcatacggccttgtcgcctcaaacggattcacagaagccgtcacaggccgggatatgttcggaaacaaagtgtccgaggagaagcggaagcaaggggcactggaagctgcgctgagtttggttggagccggtgcattggcgaagcatgtaaacaaaggcataccgcttgcaaaatcgccacaagcaacaaaagttgaaaaagggaaaaagattctagaccaagtaaaagaattcaaagtaccgacgaatgtaaaaattcgtgtccacaagactgtcacaccggatggcgctactttcccaatcattcatgctgatatgaaaacgactgctgtgaaagatcttggggttgtgaagatggtgggtagtggtagcgggaatagtaagaaacttttcggtcaaaatggaactcaaattgcaagtaagacaacatggcaaaatgggaagacagaaagaatagacattgaaaacccaaatccagggcaaagagaaggtcaaattcactatcacgagccaaataataaaaaatggtattttgatgtagaaacaaaaaagttttatgaccaaaaaacaggtgaagatgcacctagcaaaattcaaaaagtacttaaagacaagagtgttcagaaagctataaataagggattgaaatttttaggtgaggatcctgtattttagtataggagtgaagattatatatggaatatacaaataaaaatatgaaaagactaaaagaacgacttgaagatcggagtaatgcaaataaagttgacctatctaaattaaaggatattatttcacctaatatagttaaagtagacgattgctatattctagatctagagtatgagttaactgataatacaacgataaattggaatagaattttgaaaatgtacggggataaaacggggtatgaagcatcgtgtaatgagctccgcataaacgattatttagactgcagtgatttgtctgatgaagagatttcactttatgcgtttcaggtagtagacggttgggaacaacatttaaaagaaaaatttcctgagcataaatttgttgtaattataagtattgatgaaggttttgcgacacttagatttcataaatatagagaagaggaaagcggttggctaaaggccgacattgaagagtacggaaacgaagctatccttgtaaaagaaattaactttagtaataaaatttaactaaaaaagcaggcagttatactgtacctgcttttttagtttttaccttgtgaaagcaagaaacattacaaatgatcaagcttttaatggtaaaactaattcaaaactgttgatttatagagaaaaaaattaaagtttaagttttgtgaaaagtgaaataaaataattcaaaaatgtaaaggagagaatgtaatgtcgcaagaacagaagttaattatattgaacgaaatgtttaaaaaagaaggcgatccacccggcagttatggcattgaactgataaaaaacgaagattgggaaaatcctttagaagatattatgtgtactgaacttaaagaattacttaaacaattgaaccttatttttatgaaagaaatgaaaaatgaattttaataaaagatataatttgttgaaggagtcttcgctagatcgacacacaggacgattgagagcaaagactattttaagagaggaaaaccaatgaaatgaaaatacatcaaattcacgattttgatctaaatgatgaatcggactttattcaaacacaacaatccctaatacataaaatcaacctatcccccgtcatccatccagactccgtcaacacatgcgcaggcgtcgacctcgcttattgggagcaggacggggaaccgtatggcgtatgcagtatcatcgtgattgacgctgatacaaaagaagtgattgaaaaagtgcacagcatggggaaaatcagcgtgccgtatgtttccggttttcttgcgtttcgcgagctgccgctgatcattgaagcggccaaaaagctggaggcagagccggatgtatttttgtttgatggcaatgggtatctgcattacaatcatatgggcgttgccacccatgcggctttttttctgggtaagcctacaattgggattgcgaaaacctatctcaaaatcaaaggctgcgatttcgagatgcctgaaaatgaagtcggcgcctacaccgatattctcattgacggcgaggtatatggccgggcgctgcgaacacggcgggacgtgaagcctatcttcttgtcttgcggacataacattgatttagaaagcagctatcagatcacaatgaaaatgatcaatcgagaaagcaggctgccgatccctgtccgtctggctgaccttgaaacgcatgttttgcgaacgttttatcggaaaaatcacgtgtaacacttgcagtccgggaggctgcaaatgttttttattgatcaggccatctgggaggatgacaggaaccacatgtaagaagcatagacgaagaaacagttatctatatcgaacaacatatcgggactgaaacaaaaagcacctgtccaggtgcttttctttataaatgaggaaccacaagccctccatacaaaaacgccgcgataatcaggaaggccggatgcatcttgaattttgtcaaggcaaggagggaaatccccgcaatcactatcgcttgaacccagccgatcgctttgatgccgtctgcgccgatttgccaggtaagaatgagcatcatgacggcgatgacaggctggacggacagcgtcatacctttgatgacgggagattggcggaagcgctgaatgatgcgcaagaggacgatcaatgcgagcgccgacggtacgacggtggcaatcagcgcaatcaggaacccgggccacccgcctgcgctgtagccgacatacgccgcgattttggtggcgatcgggcccggcaatgcgttcgcaagtgcgagcatatttgagaattgatcgtttgagagccagctgtatctgttgacgacttcttcaaacatcagagggatcgacgccggtccgcctccatatccgagtacgtttgcgacaaaaaacgccataaatacataaatcatgatcatgaggccgacattcctttatcttttgaacgtttatttgtgattttgtcctttaatttaaaatgaaacgcgccgtacgctaagaaaatgataatgacaaagccgggattaatctgtaacgtttgcaggccgataaaagcgatgataaaaaataggatgcccgtgacccagccgaaacctttaagcgctttttggccaaactcgtacgccatgatgccgagcatgacggcgatcaccggggtgacggcgccaatcatgccggcaacaattgctgagtggcttaagacattgacagcggcaaacaagcccgccatagcaaggcatgtaggcagaatgtgggcgagggttgccaagattgcgcctaacgtgcctttcagcttgaagcccagatacgcagccatttttgtggcaatcggtccgggaagcgcattagcgatcgctaatatttctccgaattcatcatcatctatccatttgtatttattgacggcttcatggcggatgagcgggatcaccgacgggccgcccccgaatccgagaatgcccgttcggaccatcgccgccgtaatgtcccaatagggatgtttcatggctatgtcctccttacagcttcatgcccgttctgcttttataccgtttaatcagcatttggcagtcgacgctgacgacgcctttttgcgtatagagccgttttgtcaaaaactcttccatctcctgatcatttgcgaaaatgccgtgcatatgcagcttgctcggtccggtcatatgataaaggcttgtcacggccggttccttttcaagctttaatgcggtttcctccaaatactgcggctccacctccacattaaaaaacacggacacatggcggccgattttcgccgggttgatgacagcggtgaatttttcaatcacaccggcatccagtaaatgctgaatgcggtgctgaaccgccactcgcgacaggttaacccgctttcctacgtctgtataggaaatcctcccttcctcgtgcaaaatcgaaagaatctgtttatccgtttcatcaaggacaagattcggtatgctgtattcatgttccaatccgcttcaccttccttcatttggtagacattattgtatcatgaaacgttacggtatgaagggagaaattttttattgttttcgatacgtaataacttagaattatttcttatcgaaaagtaaatagtgtgtgagattttctttcaggaatgtggatggccgcgaagccgctttttatacttgagaaaatttgtaaaggggcttgccatgaatacttcaaccatcggaacgaaacaaatggtcgtcagtccgcattatctcgcttctcaggcgggggccggcattctggaaaagggcggaaacgcatttgacgcggcagtggcggtcagcgcctgtctggcagtcgtgtatccgcatatgacgggtcttggcggggattcattttggctcacttaccataaagaaacgggacgaatcaaagcttataacgggagcggccgttcagggaagcatgtgacgagagacttgtatcggggcagagaagcgatccctctgcgcgggacagaaagcgccattaccgttccgggaatggcggacagctgggatgccgtgctttcggcgtacgggcgtctttcgctcgctgaggtgctgaagccagctcttgattatgcggcaaacggatttccggtctctgccgaccagtgcgcccacacagaacgcaatctcgctcttttagcctcgatgccttacacctcggccatttttacgagaaacaaaaaagcgcccatgcccggtgaacggtttgtccaaaaggatctggcggccagcttggagcagcttgcccagaaaggcagaagcgctttttatgaaggagacctcgctcaacgcatcacatcctttctgcaaaacaacggcagccgtctgacacttgatgactttaaagcccaccgcggcgagtggacgaacccggtatcctccgattaccgcgggtgcaaaatctatcaggctccgccgaattcacagggttttacaggcttaatgacgctcaatatattggaaaactatgatttttctcagattgaacacggttcctttgactattatcatctgctgatcgaggcgctgaagaagagttttcagcaccggaatgaagtgctgactgatccggcattttctcatattccgctggatcggctgcttgataaacggtatgcaaagcagctcgcggaagaaatcggtaacgtggctgcgccggcggtaagccggccggtcggaagcgacacagcttatgccgccgtcgccgatgcggaaggaaatgccgtttcctttattcagagcctctatttcgagttcggatctgccgttacagcgggggagacgggcattctgctgcaaaaccgcgggtcatttttttcgctggacggatcccatgtcaatacacttgaaccctgcaagcggacgttccacaccctcatgccggcgatgacctgtaaagaaggaaagcctcacatcctgtacggaacccagggaggagaaggccagccgcaaactcagacagcgatgattacgcgcatcattgattacaaaatggacccccagcaggcgatcaatgagccgcgctgggtctggggacggacatggggagaggagtatgaagggctgagggttgaaagcagaatcagccctgaaacgagagaagccctaaggcagagcggccaccgcgtcgagaccgttggtgattttgacgggcttatgggccatgcggcagcgatcgtcattgatgaagaaggctttctccaaggcggggccgacccgcgcggcgacggagcggccgcaggagtatagagctacgctaactgatgaaaaaaataagcacgccaagcgcggcagaaagacccgcgtaaaacgaatcgtacacatattgcttttcctcccgccggtgccgccattccattatgccgctgcagcaaaatagtttcattgaaaaaagtcaccgctgcgatgcccgtaataagcagtgtgatttcgattaatcgatgtgtgccgtttatcggcttctgctttttaacaggctttggcaaattgagaactttgacggcaaatacttgaaacataaggctgagcaaaataaatacggctgaaaaaatcagtaactgaatgaaatccatcatctgcctcctaaaaatgtgtctctcgtttcatacgagtgatggccttgtaagtttcggcattctataagacattaggctgagttacatggtaaaagactcaaaaagaccccttacgaaaggggtctttttgactagtttcttctattataatggttcctgcttcaggtcgggcggacaagcgtatatgtcttcccgagtctggcgtattcattccccgcgagccttgccgcaggcttcagctcatctgtccgtatgtagcctttatcggcgtcatatacttggtcattcaaatgaaaacaaacgactctgccgatgatgaggtctgtcgtcgtttctccgctgtcattttggaacggaagatggcgttcgagtatacattcaaacctcacttttgcttcttttataccgggaacgctgatgcaagcgctgtctgtcacagaaaggtctgtcatgccaagttcactgacatcaggatcaagccttgccgccgttttgttaatgtcttcaataatggactcatcactgacgtgcactacgaattcccgatgagcgagtgcgtttctcgcggtgtctttctggcgaccgtccgcgcggctgactgagatggccagaagcggcggttctgcggagacaacgttatagaaactgaagggcgccgcgtttacggcgccgttgatggatgaccgcgtagtgacaaatgcgatcggccggggaacaactgtgcccgaaagcaatttgtaagtgtcttttgcgttcagttcgtctgctcgtaagatatgcatgatttcggccgcctttctttatcgtatgacctgattatacagaaagaaaattcggaaacacaacaaaagaaaaccggctgcatatcttatcacgtggcatatatctgattgaggaaaaaggcttccgtttagccggcagcctatttacgaatggtgttacttgtagtttttctttacaacccagatgttcccgtctttccagtactctgttttgctgcagtaatcgtcttttttgcaagggtcttttttctgaggacgataaggttttttctgcgtgcgttttttcttgcggcggcatgatttcttgtggctgcgagattttttgtgagaccggcatgattttttacggctgcgagattttttgtgagagcgggattttttatggctgcgagattttttgtgagaacgggattttttatggctgcgagattttttgtgagaacgggattttttatgactgcgagattttttgtgagaacgggattttttatggctgcgagattttttgtgagagcggcacgattttttatggctgcgagattttttgtgagagcggcacgattttttatggctgcgagattttttgtgagaacgggattttttatgcttgcgagattttctcttcttactgctttttggttcttggtacaaataatcttccaatccctcggtgcttgcggactttactgcttcttcgatatcagaatgggaatagtggcccattttgaaacctcctcatgatatatgttttaaggatgcgatccttactaccacatagtacgcatgaatgaaaaaagtgtatgtgtgattcgctgagttttatataaaaagcacagcctaaattaatacagggaggtttaccgatgaaagaccaatcaacattgcctctataccagctgtttattcacccgaaagacttaatggagctgaaaaaagacatttgggatgatgatccggtgcccgcggtgctgagagtgaatcaaaaacggcttgacattgatctggcgtaccgcggctctcatataagagattttaagaaaaaatcgtatcatatcgctttttattcgccgaaaacatttcgcagggcgaaagagatacatttaaacgctgaatacaaagatccgtcgatgatgcggaataagctgtctctcgatttcttcgcggagcttgggacgctgtcaccaaaggcgaatttcgtaaccctgcaaatcaatggcagacatgagggggtgtatcttgagctggagtcagtggatgaatattttctggcgaaacggaatttggcggacggggctgttttttacgcggttgatgacgacgccaatttctcccttgtcagtgatctggagcgggatacgaaaacatcgctcgaacttggttatgaaaagaaaacgggaacgaaagaagacgatttatacttgcaggatatgatctataaaattaataccgtgccgaagtcagagttcaagggggagatcgtcaaacacttggacgccgataagtatttgaggtggcttgcgggcatcgtgtttacctcaaactacgatggatttgtccataattacgctttgtaccggaatcatgaaacgggactttttgaagtcattccgtgggattacgatgcgacgtggggaagagacattcatggtgatcggatggaggccgattatgtcagaatacaagggtttaataccttgactgcaaggcttctggatgaaccgtatttccgcaaagcgtacaaacggcttttggaagagacgcttcagacccggtttaccattgaacatatgaagccgaaggtcatgtcactgtatgagcagatcaggccgcatgtcgcgaaggatccatataagaaagaagagattgattgctttgaccgggagcctgaagtgatttgcgaatacattaaggagcggtcagccttcatcagcagtgagttagagcggtggaatatctgatttggaaatgaagaaagattttttacaaataggctggtgaatcagttcccgaaaataatcgtgatacgtatatatgcattatgctttttacattatgagaaaaatgactaggaggacaatagatgaaacgcaatacgaagcggcagcggtctgatgacaactttttgcatgcaatggaaggaaaagtgattactgtctaccggggaggcccggagtccaagacagggagattagcagacattcaatcggattatatcgctcttcaggttgataataaaatcgtttattatcaatggaaacacgtgaaaagtgtgacggaaaatacgagtgaaaccgtatcgccggccgaagcggcagaatgtgaaaaagctgatgattttcaagacctgatcagccggatgaccaatcgcacggtgcaattgaatcagggaggtccggaatcgaaaagaggaaagcttcacgaaacaggggatgattttctcgtgctggaaacagaagatgacggaattgtatattttaacgccgaccatgtcaaaagcatcagcgcggaacaagaagagtacggccaagaggaggagcgcccggaatttgaaatggctgatgattttcacggcatatttaaacgcctgatccacaaatgggtatccatcaaccgcggaggtcctgaagccgttgaaggtatacttgtggataattccgacggccactacactcttgtgaaggataaagaagtgctgcggatctatccttttcatatcaagagcatcagcgaaggggcaaaaggagcagctaaaaaagaggagaataaagacgacgagaataaaggtgagaaagagagcgccgaagaagaaaagccgcatgaagaagaatcacgcgaagagcagcgtacttcctctaaaaagtcgaaaagatcatcaagatccgttcgatcctcaaaacgggaggaagagaactcttatagctacgccactgtattaaggacaatagattatcggtggaaacacggccgtaaatgattggaaagattgtccgtaaacgcgggagaggggggaatgaaatggctggattaagcagatttctggataaacaagtcgatattgagatatcggggaatacgacattttcaggaactcttttggatatcggtcaggatatcattgtgattcatgacggccggacgtttctttatattccgctgctgcatcttcagaggatgacattgacgctcccggacgaagagaataaagaaccgtacgcaagaaaaaaaagtccgcatcccgaaaaacaggaacattccttttcttaccggaataccctccagcatataaaaggcagattcacagaaatatttgttacgggagaccgttccattcatgggtatgtgacaagtgttttaaatgattattttgttttcttctctccggtttataagactcttttcatctcgatgcatcatttgaaatggctgacaccctattccgatgagcagacgccgtatacattaaacagttcagagctgccggttgttcccgctaatgtgccccttgtccggaattttgaggaacaattaaaaagatatatcgggaagctgattattctggatttaggagatataccgaataaagtggggctgttgcaggatgtctcagataatattcttgaattgaccaatgcagacggcgatactgttttttggaaattgaatcatttaaaaaccatgcacctgccataaatgataaaactgcctctcttatacagcaggcagttttttttcatgggagctaaaggtaaatccaactgatccaaacatataaaacggtaatggtaaacacgacagtgagagggacaacgataatggtcgttttgatatattctgaccaagaaactttttcgccgtgctgtctgatgatatgcatccagatcagcgtggctaatgtcccgatcggcagaagcaatgatccgatatcactgccgataatattagccagataaatgatttttacggttaatgggtcgatggacatttcagttaaggtcaaagtgctgatcattaaggcgggatggttattgaacaaattagagaggacggatgtagcaatgcccataatagatgcagcgtgggcaatgctttgtgagacataaggctcaatagactgaacaagcagcgccgtcagtccgatattatgcagtccgtagatgataatgtacatcgtgaaggcaaaaataaagatatgccaaggcgctttccttaataaatctgccggtccgatttttaaataaaaccatctccagccaagcaggatgactgaactgatgacagccacgagcgaaacggatatgccgttgtaagaagctgcaaacagactgatccggacgaacaatacaaatgccaaaacacaaaacatgatgttcgtacggctgttttgggtcgggtctggcggaggctgaagcggatgatatcgtttgtgttccagcgagtcaaaatgaaccggaatatcggggagctgtttcggcaaacggcggtaaaaaacggcaaacagcagaaaggccataaacaccagtcccagcgtgccggggataaacatcatattggtgtacaaataaaggtccatgcctatcattttgagagaaattaaattgacgatattactgacgccgatcggggtgcttgcggctgtcgcaattaatacgccgcttattaaatacggtgttttctgatgtcttttaagtccgagatattgtaagaccaatagtaaaataggagtggtgattaagacgctgccgtcattattcagaaagagcgtcattgaaaaacagagcaggttggtcagccaaaaaagccgaatgcccgatcccttggcgcggtgaagcagtttggccgccgcccagttaaaaaaaccgaagctttccagcgcgattgccataatcattgtggagataatggttattgatgctccggtgacttttgaccctatatcccccaaatcatgaaaggaaacggttccgcataacaaaacgagaatggcgcccagcgacgccggaacggcttcatttaatcccccgggtctccaaaatataaaaataatggtcacaaagaaagaaatcagggtcaaaatgacggtaatatgtgtaatgtgttctgcctccttttagatgggtcattgccgccccgttatttttatccctcctgatcagttgtactgtatgtatacgggtacaggtcgtaaggtgtactgagcgtttctaccaatttagtaaaaatccataaaagcacaaaaaaaagaggctgctttcggcggccctcttttttatgcattttccttatccgcctgcaataaagcctggcgtttattcataatatccagaaagtgtttcagaatcggattttgattatccttgcggtaggcaatgacccattcggccgtgagctgcacctgattaatgccgcggtaggcgacttcgagattaaacagctttttagcagaagaaggcacgaaggttacaccgatgccggcactaaccaatccgatcaccatttgatactccgtcgcttcctgaacgattttcggtttgaagcccgcctgctcgcagtagtttacaaactctaggtataaagtcggccatgtttctttcgacagtgtgataatcggttcattttttaaatcctgaatgtcgattgtctgtttagcggtaagcgggtgctgcttcggcaaggccagaatgcacggactgctctgcaccttttccatatgtaacgcggaatgctgtaaaggcggatgaaggatgccgatatcaatgttccccttcagaagttcttcctgctgtctgaaagaagaaatttcacgcagatcaagcttgacggaggggaatttttcgcggaattcccgaatgatcggcggcagaaattcatatgtggccgagccgacaaaaccgacgacaaggcggccgagctctccccgcgccgttctctgcgccatttcaatcgctttgtctatttcttcgatcgcgtttctgctgtgttttaaaaaactttctccggcagctgaaagctctacaacccgtttcgtgcgctttaataaggtcacgccgacttccttctcaagctgtttgatctgctggctgagaggcggctgtgtcatatttaaccgaagcgcagctttgccgaaatgaagttcttcggcaacggcaataaagtattgaagatggcgaagctccatccttatccattcctttctctttgttaattattcgtgaaacatattaatcatacggcgaattgatattggaggtcaatttccaaagagtgtatagtgaataatatcacaaattacttaaaattttatatttaatatgcataataaggagtgagggtgttggcaaaagcaacaaatgaactaaaaacctctggaaaaaatcggggggcggagcttgttgttgattgcttagtggagcaaggtgtcacacatgtttttggcattccgggtgcaaaaattgatgcagtatttgatgcgttaaaagataaaggacctgaactggttttatgccgtcacgaacagaacgctgcatttatggctgcggctgtcggaagactgactggaaaaccaggcgtttgtctcgttacttcaggcccgggggcatccaacttggcgaccggcttgttaacggctaatacagaaggtgatccggtagtggcgctggcgggtaacgtaattcgcgcagaccggttaaaacggacacaccaatcattggacaatgcggcgctatttcagccgattacaaaatacagtgtagaagtacaggaaacagggaatataccagaagcggtaacaaacgccttcagggcagcgtcagcaggtcaggcaggcgcggctttcgtgagctttccgcaggatgttgtgaatgaaatcacaaatgtgaaaaacgtacgcagcgtgccggcgccgaaacaaggccctgcaccggaagaagcggtcagcgcggctatcgcgaaaatccagacggcgaaacttcccgttctgttagtcggcatgaaaggcggaagaccggaggcggtaaaacaaatccgcaaactgcttgccaaaacaaaactgcctttcgtagaaacgtaccaaggggccggcacattgtccagagagctggaagaccaatatttcggccggatcggactgttccgcaaccagccgggcgatcttctgcttgaacaggcggatgtcgtattaacgatcggttatgatccgattgaatacgatccgaagttctggaacgtaaacggtgaccgtgctattatccatcttgacgaaatccaggccgatatcgatcatgcctatcagccggaattagaattattaggcgatatcgccgctacggttaaacaaattgaacacgacgctgtgacatttgatatgggcagccgtgaacaagaagtgctgagcgaattaaaacagatgctcacagacagcgagaaggcgccaagcgaccataaatccgacagagtgcatcctctgcaaatcgtccaagaactgcgcaatgcaattgatgacgacgtaaccgtcacttgcgatatcggttctcacgcgatctggatgtcccgctacttccgcgcttatgagcctctgaaactgttgatcagcaacggcatgcagacattgggtgtagcgcttccttgggcgattgccgccacattggtgaatccgggtgaaaaagtcgtatccgtttcaggagacggaggattcctgttctctgcaatggaattggaaacggcagtccgcttaaaagcgccgatcgttcaccttgtatggaatgacagcacatatgatatggtcgcattccagcaaatgaaaaaatataaccgtacatcatgcgtagatttcggaaacattgacatcgtaaaatatgcagaaagcttcggcgccaccggcttgcgcgttgagtcaccggaacagctggcagacgtgctgcaaaaaggcttgaacacagaaggtcctgtcatcattgacattcctgtcgattacagtgacaatgtccatttatcaagcgacatgcttccgaagcaattcaaagaaaaaatgaaagcaaaagctctctagcactctgcgcaccatgacctgttttctaaaacagcccaatttaaaaggagtgaagggaatatgaaaaacgcaagcgacatccatatgatgagccgcggagaaaaaggctcacctgaggatcagatctatcaagtatcaacaatgacatctctgctggacggagtatatgacggagattttgatatggctgacattccgaagttcggtgatttcggaatcggcacgttcaacaaattggacggcgaattaatcggatttgacggagaattttaccgtctgcgcggcgacggaacggctacgcctgttaaaggcggagacctgtcaccattctgctcattcacatttttcacgcctgatatgacgcatacgatcgacggcgaaatgacccgtgaagaattcgagcaggaaatcgccagccttctgcctagtaaaaacttattttatgcgatccgtttagacggcgtatttaaaaaggtgcagacaagaacggtagaacgccaggagaaaccgtacgttccgatgatcgaagcggtgaaaacacagcctgtgttcaactttgacgacattcagggtacaatcgccggcttctggacgccggggtacgcaaacggcatcgctgtttccggatatcacctgcacttcattgatgaaggacgcaattccggcggacacgtatttgactatgtcattaaagattgtaaagtgaccatttctcaaaaaatgaatatgaacctcaagcttccgaatacggcggactttttcaacgcaaatttagataatccgaattttgcgaaggatatcgaaacaaccgaaggaagcccggaataaattaaaaaagaaagccccatttttctcgggggctttctttttatttggctgaaccggcaaagattaggtaaaatacagtcaaaagggaaaggtgtggtagctgtgaaagtattggtattagcggttcatcctgacatgaacaactcagcggtcaataaggcgtggacagaagaattaaaaaatcatgatgaaatcacggtccgtgagctttataaagaatatccggacgggaaaatagatgcggaaaaggaacggcagctgtgtgaacagtatgaccggatcgtatttcaattcccgctgtactggtacagtgcgcctccgcttttaaaaacatggatggatcatgtgctggcgtatggctgggcttacggctccaaaggaaaggcgctgcacggcaaagaattgctgctggctgtttccgtaggtgccggagaggatgcatatcaggcaggcgggtctaaccatttttcactgagcgagctcttaaggccgtttcaggcaatggctaattttacgggtatgacctatttgccggctttcgcgatgtacggggttagcagcgccgatgctgcggctatccgtgacaatgccaaacgcctggcggattacataaagaagccattttagagtcgtatgcattcatcttcatccgacaatatttcctgagaaatatttcgaaccttagacgtttctgactgctcaagaaagaaaaaacggatttcgcgctgaatttgcgaaatccgttttgatattatgtcagtttttgcagatcttttgtgctgatatatcccgttgcgcccccgtaatcgacaagcgcccagccgaagtcaatgccgccgccggctgtctttttccatccgaggaaagaaacgctcgtgtttttagcaagggaagctttgaccgcttgtttgtctgtatatacttttgtttttgccgttgtttttacggttgttgcttctttaacaatataatgagtagatacaaatcctgtttttccgtttttataatgtacttttgcccagtcagcgttctggaatgaaacgatctttaagctgtcgcctaaatgaagggtatcagctctcggactggctgctgatgcttttgttctgacgttcaatgcttccgcggaaacgagataagagtcaagcgggtagctgtacagatcgtcaattttgaccgcttcttgcgcgtgtgtctcgggaagaggcgttattccggcagctgaagccgctgttattcccgctgcaagggtcagaatggatgccgctttggctgttttcttcatctgtatctctccttttacttcatcctttcacgttttaccggaagtctaaacatcggccggttatttttgtgtttgaagtttcaatggagcggaaatggtttttttgactttttctcctttgagcacctgctccgccgcttcggccgccagttttccgatcagctccggctgctgggcgaccgtggctgtcagctttccgtttttaatggaagaaatcgcatctttatttccgtcgaaaccgacgaccagaatgtgtttgcctgagctgttaatcgcttcgagcgcgccgagtgccatttcatcattatgggcgaacacggctttaatatccggatgtccctgcagcaggttttccatgacggtcaatccttttgtacggtcaaaatccgccgcttgctttgttacgacatccagctttttgtcggcaatatgatgaaagcccgttccgcgttcccgtgtcgcggatgcgcccggcaccccttgcaattccgccactttggcgccttttccgagctgatcggcgaggtagtcagccgccatttctcctcctttgacattgtcagaggcgacaagcgtttcgactttgccgtgttcggctgaacgatcaagcgcaatgacgggaatgccgagggaatttgccgattcgacggctgttgaaatcgctgatgaatcggtcgggttgatcagcagcgcatcgactccctgctggatcaaatcttctacgtcatttgactgtttagatgaatcattttgagcatcgacaataatgacctgcatgccccgttttttggcttcctttacaacgccttcttttaatgaaacgaagaacggattgttcaatgtggagacggagagcccgatagtgaattcttttttatgttttgtgtttgacggttttgcccattgtggcggttcaagtgaacaggcggacagcaaaaacagtgataatgccgcgatcgtgatgatggctttcttcataatggtcctcctactatgccgattttttgcggtccagcagcaccgcgattaaaatgacgattcctttgacgacgagctgataaaaagatgatacgccgagaaggttcaagccgttgttcagcgtaccgataatcaaaaccccgatcagcgtaccgatgatgcgccctcgaccgccggacaggctcgttccgccgagaacgaccgctgcgatggcgtccagctcatatgattccccggccgtcggctgtgcggaatttaagcgtgatgtcagaatcgctcccgccagcgccgataataaacctgtcagagaatagatcatgatcttgatgcggggcactttgattcccgatatcagcgccgctttctcattgccgccgatggcgtatgtccggcggccgaacggtgttttgtgcagaagaacccacagggccgcaaatgcaatcagcatcgtaatggcaggtacgggaatgccgagaaaataaccgcgcccgaataattgaaatgcgtaacttgaaccgagccccgtaatcggatttccgtccgtatagacgagggtcagtccgcgaaagacggtcattgtcgccaaagtggcgatgaacggcgccatttttccttttgtgattaataatccgtttatcatgccgagtacggcgccgattacgcagccgatgatgacggctaagatcggatcgatgcctgagaccatcatacctgcgaccaatgcgctcgataaggcgaggatcgctccgacagagagatcaatgcctcccgttaaaatgacaaacgtcattccgaatgcaatcagagcgttaatcgcaacctgccgaagaaggttgagaatattgaggggttcaagaaaactcgggtttaaaacggaaacgatcagcacaagaatcagtaagccgagaaacggaccgagtttttgtgtgaaggtgtgaatggaaaatcgcttttgttcagttgatgtcattggttcagttttcatactgctgccctcccgtggcaagtgtcatgatgtgttcttgtgttgcgccggccgcattgatttctccgctgatgcgcccttcgtggacgacgatgattctgtcactcatgccgagaacttccggcagctcggaagacaccatgatgatggcgactccgcgatcggtcagttcattcattaatgaatagatttcccttttcgcgcctacgtcgacgcctcttgtcggttcatcaaggatgagaactttcgggccgattccgatccatttggcgatgacgactttttgctgatttcctcctgataaatgccgggcggcggtttccggagatgcggtcttaatggtcagacgcttgatgagcagctcaacgaactccgcctcgcgttttcggtcaatgatgcctttcggagagaagctggtcaggttcggcaatgagatattttcacgaatggacgtatccagcagcagtccttcatctttgcggttctccgtaatcaggccgagtcccttgcggatggcatcgtacggaccccgaatgccggtttttcggccggaaatccagatctctccggaatcgagcctgtcaattccgaacagcgccctcatgatttctgtccgtccggcacccattaagccggaaacgccgaggatttctccggcgctcacatggaaactgatctgtgaaaagcttcctttttttgaggcgtttttcacttcgagcaccttatcgccgagtgacggcgtgcgagtcggataccgatcggtcagctcccgcccgaccatttttttgaccacttcatcaaaattagtttctttcatatgcgccgtatcgacagtgaggccgtcccgcataatggtgatccggtcgcaaatcgaaaatatctcttccattcggtgcgaaatatagacgatggatacgccgtcccgctttaacgccgtcatcacgtcaaacagtttgctgatttcccgttcggtcagcgccgcggtcggttcgtccataataatgacttcggcgtttgtcatcagcgctttggcaatctcaatcatctgctgctgtccgacggaacattgtccggcttcccggtcaagaggaagagagactcccagtttttcaagctgtgattttgctagcgctttcattttcttcgtttccaaaacgccgaacgccgtcgtcagctctttgccgataaaaaggttttcaagcaccgtcatgtccggccatatattcagttcctgatggataaaggcgattccgtgcttttcggcttcctttggattggagaagctcatatttgttccgtttatcgtaatgtttcccttgtcgagccggtagagcccggtgagcagattcattaacgtcgatttgcccgctccgttttctcccattaaagcgtggatttctcccggcagaagctcaaatgagacgccggaaagcacttggtttttgccgaatgctttatgaatgtctgtcatgccgatgtgcatgctggatcccttctttctagaaaatcacacccgcctgcaggatgcagttggcgtatggtgtcatttcacccgttcggatgacggcttttgctttctgtgtgagccgtttgaattcctcgtgggacatgtactcgatcgtctgcgctgagaaatggctttctatgaaacttgcattctcggggtttgcgtctttgatctcggaagcggcgatcaccttttcgactgccatctccccggctaccaggctggtcacgtcccgaaaggcgggaacgcccgccattaaggacaaatcaattttagggacaccgtcagggacggggagacccgcatctgcgattgcgatgaggtctgtatgccccagatcggccaatactttggcaatgtggctgtttaacattccgtgttttttcatgacagcagctcctcaacttcttttctggccggcatgccgccttgggcgccgaagtgctgcacggacagggaggcggcgcggttggcaaacaggagcgcttgctcaatgtcccgtccttccgcgagtgcgacggcaagtgccgcattaaaggtatcgccggctcccgtcgtgtcgaccgcttctgcagggaaggcgggaacaagccgttccgcggtgccgtctgagtagcgcacgccttgttttccttcggtaatgaacagtttgccgggatagccggcgagcgcttcttctttcgtccggtcaggaaataaaatggacgcttcatgttcgttcggcgtaagatatgcggcatcctcaatcgtcgattgtttcagcggccgggccggcgcgggattcaggataaccggaatttgctgcgcgcggcagtagctgcacacttcttcaacggtttcttcaggaatctcctgctggatcagcacgatatcaatgccgggaagttttgccagcgcacttttggcataatcgggggagatgtcatcgtttgcgccttttacgacgacgatgctgttgtctccttctgcgagcacaatatgagccgttccgctttttttatgtgtaaccgtttccatgtagtccgtattgacaccgtttgccttcaggttttcaataatcgcttttccgtagctgtcacttccagcttttcctaccatatatacgtttgcgccaaggcgggaagcggctacggcctggtttgcgccttttcctccgggcacggtttgaaagtctgtgcccagtacggtttctccggctttcggacgccgttcggatgtgacgaccagatccatagaacagcttccgataacacaaatttcactcatggtgatcatcctttctcgtcgtttgtcttcgtatgtaagtcacgggcagttgaatggccgtctctttcggcggctctttctttatcaattgcagcagcaggtttgccgcttgttttcccatctcatatgcaggctggcggatggttgaaagaggcggaaacaaaagcctgctctgcggaatatcgtcgtatccgatgatctgaatctcctccggaacttttttgccgagccgcagcgcctcatggaggacggcagccgccgcaatatcgttgctggcaatgactccgtcggtttccgggtatactgcaaacaattcttctgctaaaacggcagcatccttgatggaaaatgaagcggcggagatgacattgaactgaacgcccgctttttgcagcacgttaagtgcgccgttaaaacgttcctgagcggtcggaaggtgggctgggcctttgacaagcgtgatgcttgtgcttttgccgcgaagcatttcctcagccgcccgttttccgcctgcccgcccgtcactgaatacggatggggcgccttcttttgtccggtccagaaatacgaccgggtaaaggctgccgctgtattcgggaaggtcggggtaatgggtggccgccaaaataccggcaacttgattttgtttaaatgtttgcaggtagtcgagttctttttccaattcttcatcgctgttgccgatgatcagccggtatccttcccgctgcaactcgtcttcagcgccgcgggcaagctgagggaaaaagggattcgtaatatccggaagcaagagcccgaccagtctggattctcttttataaagagagcgggcaacttcattcggataataattcagcttctccatggcaagcatgaccttcgttcgtgtatcttcatgcacgtagccgttgtcattgaggacacgtgaaaccgtggcaacagagacgccggcagcgcctgcgacatctttaatcgttgccaacaaacactcctccttcaactgtgtaaccgtttacataaaaagagtaacacgaatcatttcggttggcaacaaaaaaagagaccggggtctcttttagttcacgatgccgatttgtgagatattcactttgatatcagggatgatctcgatggaaggatagacctcacgccaattgagccgcttgccccgctcataataatgggtttgatatttccggccgatgccgaggatatccgagttgtgctcctgaatatggctgatcaccgatctggcctggctgttcaaatttgctgaggcttgtttgttcatttggtcgattgccgtataagaattcagcttgtcctttggatattccaagacgcgtgcattcagttttaaacggattttcacttttatatgctgcggatctgtatctataaatacaatctttcgcgtggcatccgtgatgccgagagaaagataattttcaatatccattttgtatttgtcccacagcttcagattaatattagccgatttattaaattgcccgcttaaaagggtcaggagggttgaatcctgaccgagcacctcagtcactttccgctggccgctgaacagggcagaaccctctatctttatcgtctgtccgttaatcgataaataaggtagggcgaaatccttatcagccgtcagcatgcttgaacggatggattgcaaattctccatgctgatatttgattccgcattagcgcttgttaataaattcgttaaatacttgctgacgatcaatttctgccggacgatcagcttcagcacttcaatcgcctcgccgtcttttacaaccgccggatgagcgagaagcgggcttttcggatctctgtaaaagacatcgagataaggaaaaagcggtttttccgccattttctcaccgattaataagactctttgcttggacgtgtcaatgcgctggtcgacaagcttatccaattgaaaccgcgcttcacggatggtgtgcccggaagcgctgagcaccgtcgtaatgaatgagccgcccgtttcctgttccgcctgggaggactgaaccttccgataggtgatgccgattttatttttaccgtcatgatcaacatcaaggcttgcggtcagcacgagagaaatatctttcagcaaattttgatcccagcagcccgcaagtgtcaggcttgcgcacatgagactgataagaaccgcttttttaatgcgcatggcggacaccctttttgcgtacaaggataatcaataccataaacaaaggaaacaaatacacaaacacaatatcggaaatgcggaaaaactgatccagctgctgtatcgttttatctgtgcttgtggcccaaatagacagaaggaagacgagcagggccagcggataaacaaaccggctgtgatctttttgattgaacagcttggcaatgccggtgcttgccaagtaaaacacgttggccagcgttgaaaagacggtcacgaaccaaaacgtcaaaaagagcagatccgtccgttcgataattctgaatgaaacggtttttaacaggtacagcacaggctccgggatcatttttatttcttcggggctgattgtgacaaagcaagtaagggtgatatacaggtaataaaggataatcaagatgtttgaaatcgtcagtattttgtagcgctggctgacggtgcagttgattaggggcccgatcacgagcgccgcctgaaagccggtaatgctgacaagtgtttgctgcaccccggtaagcatgtcttttgcggttccgtgaaaaatcggcataatgtatgtgatatcggcttttcccagcgtgtataaaagcggcagagagatcagcagcaaaaacggcgttaaaataaagctgaacctggcgatcgcattcagcggagcctgggcgatatagacagaaccgaggatcagcattaagctgatcacccaattcggagtctgagggagcacccagatatccaatatccgtgtaaatacagaaagaatgagcgtgcagagaaacgcgaaatataaaatatacagcacctgcacccctttgccggcaagtgttccgaacacctcctccagcatttcgtacaggttcagcttcggaaaccggtgaaataatatcatatacaggctgaatgtaagctggacgagcaatccggtaagcagaatggaaatccatccgctgcttcccgatttcatcatcagtaaatggggcagcgccaaaatgccgatgctgatctgcgtctgattaatgaaaaacacgccttgaagccggctgatttttttaggcttcatcttttctccacccccgaacatgtttcatctgctttgagtcttgcggtctcaaataaaaaggccttcttttaataaaccaagccggcagccggataaatgcatccttcaagtcactgaaatgaaacggcgtcaacgatgataaataaggaacgccgagtgattcaagcttgcacaggttcatcagaataagcccgaagccgagtgcgatgccgataaaaccgaacgaggatgccagaaacataagcggaaatctgagcgttcggatggacgtgctcatttcatatgaaggaagcacaaaagaagaaacagccgtaacggctacgacgataatcatcatattagaaatgagtcccgcctgaacgactgcgtcaccgatcacgagaccgccgacaatgccgatcgtctgactgatcggtctcggcagcctgataccggcttcgcggatcagttcaatcgtaatttccataatcatggcttctatcagcgggggaaagggaatatcaacaatcgaatttttcatggtgataatcagatcgttgggaatgacttcaaaatgaaacgcaatcagcgcgatataaaaagcgggcagcgtaatcgcgatcataaaggcgaaaaatctcagcactcttaaaaaactggcggaaatccatctcgtgctgtagtcgtccggagattgaaaaaaggaaaagaatgtgatcggcgcaatcaaagccgacggactcccgtccatcatgatcagtacacagccttccatcacgcatgcttttgctttatccggccgttccgtatgaatgatctgcggaaaaatggaaaacgaattatcttctattgattcctcgataatcccgggcgcaagcacgctgtctatacgcaagtatgacaggcgccgcttcacttcctccacaatctccggattggcgatattctcaacaaagataaccgcaacttttgatttggctctttccccgatatccatataatgaacggagagatggcggtcctgtatgtgaaaccgcagctgatgaatgttcgtttccaaactttccacaaacccgtcatgggcgccgcggacgatactttcagattcgggttccataatggaacgcagcggattctggccgacggaaaacagcttcgctttcctcgatgcatcgctgagaaaaacaacctgtcctgccaaaatcccgtcaatgagttttctgatttcatccgtttccgcactgctgacggcattcatcgtttcctcaagcgggccgttctgcagggtgtcgcttaacagaaactcattcagcttctgttcttctatcatctgttcaatataaaagaaagcggtatgacggtcctgcagtttgatccttcgtattttaaaatcaccgcaaacacacatcagctcctgcatttcccgtacagccgattcaaaatcgccgggaatccgtttgttttgtttatccgcagacatcagaccgcctcctttcctggttatctgtagttttcagcgggtattccttttttatgcattttataaaatagaggagttcctcgatgttttaccaagaacttcacaattatggatgaatatttcttgaacgaatataaagatttattaaaattatttcaaaagagtgataaacgtcctgtaaatggtttaaaaggagaaaggctttccgcatataaaatgtgtatttcttgtaaacactccggacccgtctttttctgtcatgtatcagtcattccgctagttattttggaatgggactgaaagcaggatacgggggaaaaatgaatgactttaagaccttatccttaacaaaacaggcagtctgcacacagcggacagagagtcccaaaacgtatgcgcagtgcgaaaaccgctgatacaaacgggctggaaaagatggattatcattacatctttttcttccggaacgcgaatagttccattggtccaaatgaatttctgcgcgaaaatgtaaacgcattcatttttcttttgaaaaattgaagtaaggttgaagtcctgcctattcccaaaaaaagcaattcgataataggaagaatagcgtcactaatagagaagtttggctcagtgaaagcgggaagattatgttacataatgccgattgagaattcatagtgaagctatatactgatgaatgaatttatcaatacagaaggagatgtcaaaaatcaatgtggttactcattatagcctgtgctgccgtactaatcatcggaatcattgaaaaaaggcggcatcagaagaatatcgatgctctgccagtacgcgtcaatattaatggtatccgcggaaagtcaaccgtaacgaggctgacgaccggaatactgatggaggcgggctacaaaacagtcggaaaaacgacgggaacagatgcaaggatgatctattgggatacacctgaggagaaaccgatcaaacggaaaccgcagggcccgaatatcggcgagcaaaaagaagtaatgaaggaaaccgtagaacggggcgccaatgccattgtcagtgaatgtatggcggtaaacccggattatcagattatctttcaggaagaactccttcaagccaacatcggcgtcatcgtgaatgtgcttgaagaccatatggacgtcatggggccgacgcttgatgaaatcgctgaagcatttaccgcgacgataccgtataacggtcaccttgtcattacagacagtgaatacacagacttctttaaagaaaaagccgcagagcggaataccgaggtcattattgcggataactctaaaattacagatgaataccttcgaaaatttgaatatatggtctttcctgataacgcttcccttgcgctcggcgttgcccaggctcttgggatagatgaagaaacggcgtttaaaggaatgctgaatgcgccgcctgatcctggcgccatgagaatcctgccgctgctcagcacgaaggagcccggtcatttcgtaaacggctttgccgcaaatgatgcatcttctactttaaatatatggaaacgtgtaaaggaaatcggctacccgacagatgaaccgatcgttatcatgaactgccgcgccgaccgtgtggacagaacgattcagttcgcaaacgacgtgcttccgtacattaaaacgaaggaactcatactcatcggcgagacgacagaaccgatcgtcagagcttatgaagaaggcaagattcctgccgatacattgcacgacctggaatataaatcaacagacgaaatcatggacgtgctgaaaacaagaatgcaaaaccgtgtcatatatggcgtcggcaatatccacggttcagcggaaccattaattgaaaaaattcaagagtataaggtgaaacagctcgttagctaggaggaaaaggataaatgttcggatcagatttatatatctcacttattttaggcgtgttaatcagtttaattttcgcggaaaaaacaggtatcgtacctgccggtttagtcgtgccgggttatttagggctcgtttttaaccagccggtctttattttactcgtattgttagtgagtcttcttacatacgtgatcgtcaaatacggtttatccagatttatgattttgtacggacgcagaaaattcgcagctatgctgataacgggaatctgcttaaaaatcgctcttgatttcctttacccgatcgtaccgtttgagatatcagaattccgaggaatcggtatcatcgtaccgggtctgatcgccaataccattcagaaacagggattaacgattacatttgccagcacgctgttcttaagcggcgcaacttttgccattatgtttgcttactacttaatctaatgtaaggtgtgtcaaacgatgaaaaaacaattaagctttcaagaaaaactgctgaagctgaccaaacagcagaaaaagaagaccaatcttcacgtttttatcgcgctgccgatcgtcttttgcctgatgttcgtctgcatcctgacagggaaggcggaaacgccgagtgtgaaaagaaatgccgatgaccttgtatcagcctcattcgtcggagatattatgatgggccggaatgtcgagaaagtgacaaagcataaaggcacggagagtgtcttccgttacgcaaagccattcttcgaagcatccgactatgtgtcggggaactttgaaaacccggttacatataaaaagaactacaaagaagcagaaaaaaatatccaccttcagtcaaacaaagatgccgtaaaagtattgaaggacatgaatttcaccgttctcacggcagccaacaaccatgcgatggattacggccctcaaggaatgcgggatacggttgaagagttttcaaagcaaaatcttgaacttgtcggcgcgggcctcacgctgaaggaagccgagcagaacatttcttatcaagatgtaaacggaatcaaaatcgcaacactgggtttcactgatgtttccggaaaaggctttgcagctaaacgaaatgcgccgggtgtgcttccggccgatccagagctgtttattccgatgatttctaaagccaaaaagaaagccgatcttgtcattgttcaaacacactggggacaggaatacgataatgatccgaatgacagacagcgccaattggcaagagcaatgtcagatgccggagcggatattatcgtcggacaccatccgcacgtgctagaaccgatcgaaatgtaccacggcactgttattttctacagcctgggcaacttcgtattcgaccaggggtggacaagaacgagagacacggcgcttgttcaatatcatctgcagaaaaacggcacgggacgctttgaagtcacgccgatgaatattcatgaagcaacacctgcaccggttaaaaaaggcagcatcaatcataaaacgatcgtacgtgaactgacgaaagaatcgaatttcgattggagcgtcaaggatggaaaattaacgtttgatgtggatcacagcgatatcttaaaaaagaaagcggagtgaaaaacaaatgaaaatcattaaagcgggatggccgtttgccgcgatcattatggtatttatgtttatgtcagcgtttaaatacaatgatcagctcacagatcaggaaaaacaaaaaattgacacggaaatgcaaaagattcagcaagaggacacagcgggcgcaaaataagcgcatgattccgcttgccggcatattgtttgttccgattccagtaaagaatgcccatatcgggcattctttttttgtgtgctctcctaaacatttgttaaaagttaccgatgtaaaaactactaaaaatgaggagagtgaatagaaaacatgctcacaagctggaggaagtacatccttgccggccttatgatttgtcttgtggcacccgcagtaacgagaacggaaattgctgaagcggattctcaagtttctgtcctgatggtttcagacgcgcaaaaacttgtcggaaataaatatgtttacggaggcgaagagcctgaggacggttttgatccgtccggattgattcattatcttttcagcagacagaacatccatctgccgagaacggtcagtgatcaatggaaggttggaaccgccgtcaaagaaaatgaccttttaccgggagatcttgtgtttttcaaaaagtcagattcaacacaaaacgcacccgtccatgacggtctttatatcggaaacggagagatgatacacagttctccgtcagaaggcgtaaccgtcacacggtttcaaaaaagcagttattggatgaatttatatcttggcgcaaagcggattacaaaagatccggaactggctgatgacccgatcgttcaggaggcagcccgttacctcgacattccgtatgtattcggcggaagcacgcctgaggagggattcgactgttcggggctggtccaatatgtttttgaaaacaagcttcacatttacctgcctagatcagcggaacagcagtggctggtcggtgagaaaattaaactgagcggcataaagcccggggacgtgatttatttcagcgacacgtataaaaaaggaatttcccatgcgggcatttatgcgggagagggaaggttcatccaagcaagccgctccgaaaaagtcaccatttcttacttgtcggaagattactggaaaaaacattttacaggtgtgcgccgattcagcaatttagccatttctaaagaaaatcccgttgtgtccacagcggccgatcatatcggaatttcttatctgaaaggcggcgtttcaccggaaaccggctttgatacggcgggatttgttcaatacatctatcaaaaagcgaaaggaatcagcctgccgcgttatgcggacaagcagatgcaggcgggcgttccggtcgataaacaagatctgaagcccggcgatctggtcttctttaaagcggaaagcctgaatccggccatttatatcgggagcggacaagtgattcatgtcaccgtgtccgcaggcgttaccataacaaatatgaacacaagcgcttattggaaggacaaatatgcgggcggcatccggcttccgtaaaaatagacgtcagagagtgtctctgacgtctttttcttttaccgtttcggcgctctgtatccggctgctaccgcatcctctacggaacagaacatttccgcgggatctgtcgtccggtcgtagtatgtacttcccggcgtgtgataaatgccgttccggctgcctttaatgtcgcatccctgtgaggtgtcggctgctttcgtttcggcatgtccgccggaggaaggggcgttgttttgcgccgtttccgcgttttcggatgtttttgtttctgctttctgccgctttaaagttttattttctgactgaagcgtttccgcggtcttttcgagcttcttttgtgaattttttaatttctcattgtcttgtttgagtgatttgtttgtttttttcagctcacttatctcttggctgagtttgctgagtttttcttcattgccggcttcggcttcggatttctccttttcggccgcggcactgatgctttcatattttttctcaagcgcctggtgttccttcgtcaatttttgataagcggtatcaagggtgctgtatttctcctctgccttcacggccgaggcgtccggctctgcgagggaggcgccggtcagaagcaggataaatccgccgatgagaaggggccaaaacagcttttttgaaaaacgtttttcttttttggcagctttgcatatgaggtggaatattccgtatccgactgcgcagagaaaagctaaacatcctataatagcgattgcattcgacatcatgaaactccttttttctttatcttacaatttattttcatttttgggaatttcttttttggaaaacgtgaaaagccaggccgtgaaagacctggctttttccttttattgatcgttgtcgagaagccggttgatgaaatatgcgacgccgttttcatcgttgctttttgtaatatacgtgcttttttccttcagttcatcaatcgcattgcccatggcgatgcggtttcccgccgcttcaaacatggagaaatcattcgggctgtcgccgatggcgtaaatatcttgtttttcaattccgtacagtgaggcaagctccgtcagagcacgtccctttccggaaccggcagggaggatttcgataatgtgttttccggaagatgtctgggataatttcggatgatgtgtaatttcttctttggcgtttctcagtttttccatatcaaaagagaaacaaagaagcttgtaaacatgttcgtctccgttaaaaatcgcctgtatatcctgtacgggtttaatgccgaattgtttgaactgcgtctttgcgccctcccataatgtctgaatatcttccttgggattggcgcttttcagaatatccagttctgcctgcagtttggactcgccgtcaaatggggacagcagatgatcatctgtatagacctcaaagtaaatgtctttgtccgttaaataagcggctatatccttcccggcctgctgatccattaagagccggctgacgaggcggtatcctttgtcatggactgtcccgccgtttgccgcaatgataggaatatctaaatccttcaagagcgcttttacatcaaacgtggctctgcccgtgcagatggccacgagaatgcccgcttcatccgctctttgtaaagccgctctgttttccggagaaatcacactgtccgagttcagtaatgtgccgtctaagtcaatggctatcaatttcatatgtatggatgccctccttaaaaataaagctgcttcatgtagtatgttcagctttgtgcgaaatcagcagaaagccttcagttaaaaggctataccttcatgtcctttttttcaacagaaaaacggcgggatttgctaatcccgccgtgacgtcttacgcgtttaaatcattttttaatttcgttttcacttcttgaaggttttcctcattcagcttgaagtaataaatatttttgccgtactgaggagtgtaaatatagctgtctgaacctgtcagctgcaaagaatccaccgatttcagcgatgtgataaacgggaacagaccgatggcgtcattaagagataagttcatttttaagtttttccctaagctgtcgacgatatcgtcataagatgggatcgagcttaacgatttagattttttaataatggcgctcagcacttccatctgtctttgtccgcgcatcagatcggtgtccgctttgcgtgttcttacataagccagtgcctgctcaccgtcaagcgtctggacgcccggcttcagcacgacttttccttttgtatcgactttaatacgatcggcaactttctggcttttcacatttaccgtaacgccgttcaactcattgacgacatcgcggaacgcgtcgaagttgctctcaaccacataatctaccggaatatcaagcatgttttctactgttttataagttaaattataaccgccgtaagcatgtgcgtgcgcgaatttgtcatagccgtgtcccgggatgttgacataggaatcccgcggaatgctgagcatcgtcgctgttttctttttccggttgaaggtgacgagcacgttggcgtcacttcttgcgtcatctactgattcgcccttattgtcacgggcgtctattcctaaaagcaatacggtgaaagaatccttcttcgggtcaaattctttgatccgttttacggactggtcgccgcggtcaaggctgacgtgcgcttctttggtcgcattattcaatttcacaaatgcgtaggtgccgacggaaccggcgatcaccaataagaaagcggcgaataccagtacaaatttcacccattttctgaggcgtcttttcttttttctgcgttgagatcgttcttccatatcattacctctcgtttctattctttgtgaagcgtaccataattgttgacttggagcaactctgcaaatgagaaaattccaaatctttctctctatttcgacaacatctactgttatttttgcatcaggttcacattatattggacggcaggaagcgggaaatgtttcgtcgctttgtaaaaaataattagtaaaataatggatattaacggtgcggaaggtttgaaacggacgaaaacaggtaaaagaagcagtagaacaattccgcgcggatacagcgttggatgaagggagtctacataacatgaaaagcatacactcgaataaatggctctattttttcggcgcactcggcggcgcgttatacggatatgataccggagtcatttccggagctattttatttatgaaaaaagaactgggactgaacgcctttacagaaggcctcgtcgtcagttcgttattggcgggggcgattctcggatcggggtttgccggcaaactgaccgaccggttcggcaggcggaaggccatcatgggagcggcgctgctgttttgtataggcggtttaggagtcgcttttgccccgaatacagaggtgatggttcttttccggatcattctcggactggctgtcggaacatctacaacgatcgttccgctctatttatcggagctggctccgaagcataaacgaggggcgctttcttcgctgaatcagctgatgattacggtcggaatcctcgtttcttatatcgtgaactatatatttgccgatgcaggcgcttggcgctggatgcttggacttgcggttgtgccgtcagtcattctgctgatcggaatcctatttatgccggaaagcccgcgctggctgtttacgatcggcaaagaagagaaagcaagagaaatcctttcatcattgcggggaacgaagaatattgatgatgagattgagcagatgaaagaagcggaaaaggaaaacgaaggcggcttgaaagaattgtttgagccgtgggtgagacccgcgctgattgccggcctcggacttgcctttttgcagcaattcatcgggacaaatacaattatttattacgccccgaaaacatttaccagtgtcgggttcggcaattccgcgtctatattgggaacggtcggaatcggcgccgtcaatgtcatcatgacgcttgcggctattaaagtcattgataagatcggccggaagccgctgctgctggccggtaatgcgggcatggtcatcagtctgctcgtattggccgcggtcaatcttttctttgaacattcagcagccgcatcatggacaacggtgatttgtttaggcctgtttatcattgtgtttgcggtcagctgggggcctgccgtgtgggtcatgcttcctgaattattcccgctgcatgtccggggtatcgggacgggtgtctccactttaatgctgcatgccggaacattgattgtctcattaacctatccgatgttaatggaagcagtcggcatcagctatttatttctcatttatgccgcgatcgggatactggcattcctgttcgtccggtttaaagtgaccgagacgaaggggaaaagccttgaagaaattgagcaggatctgaaaagccgtaacggaggctcgggatcagaatcaaatcggcggacagttcatccgtaatattcagttttagggggcggttattcaccggcccctcaaaacggatgccgtgcgggcgcccggtcacataaatgacggggatatgtcatacgttgtataaagtcacgataaaggcggggatgccggtgaaaacgagtattattatccttacatataatgaacttgagctgacgaaaaaatgtctggccagcattgaacgatacaccgacaaagataagattgaactgattatagttgacaacggttcctcagacggaacgagagaatacatatcaaatctgcctgacgtcaaagtcatcctaaatgaaaaaaacctcgggttcgccaaggggtgcaaccagggtatcgaagcggcagggggagaaaatctgctgtttctgaacaacgatacgatggtcacgaaaaattggctcacctccatgctgagggtgctgtatcaatctgaaaaaaccggtatggtcgggcccgtcagcaactatgtcagcggtgcgcaaatgatccataacgcatatcaatcgcttgatgagctggagtcattcgcggaggcgtattgcgcacgggaaaagcatcatacaaagcgggtgctgcgccttgtcggtttctgtcttctggtgaaaaaaagcgtcattgaagacatcggcccgttcgatgagcaattcggatacggttcttttgaagatgatgacctatgtctgcgcgccctccaaaaaggctacagcctgcacatcgccctcgatgcctttgtgcatcaccacgggcacgcgacgtttacggctaatcaggatatcaatatcaatcagttatattcggagaaccgccagcgttttacggaaaaatggggcactgattttacgtactttactcatccgagaccggaaattgcggagctcgttccccgggaggcgaaacggatacttgatgtcggctgcggcgcgggggctacggggctggaacttcaaaacagacagccttgcgaactgtacggaatagaactgcacccgctggcggcgcaagcggcaaaaggacactatgaagcggtgctgcaggaagatgtcgaagaagtgaagctgccttatccggaaggcttttttgattgcatcattttcgcggacatccttgagcacttaaaagacccgtggcgcgtcattgaaacgtactcatcctatttgtcgcctgccggatcaatcgtttgcagcattccgaatatttcccacgccgaagcgctgtttccgcttctgctcggtgactggacatacagagacgccggcattctcgaccgcacccacttacggttttttacgccgcagacggtgcgcacgctctttccggaagagacatttgctgtgaaaaagcagtcctatacgtatgttcacgtggatgagcgggtgcagctgtttttacaggaaatcacacgaatggcgcaatcgatgcaatttccggtgatacagctgcccgaacaaagccggatttatcagattctcctccgggtcgaaaaaacaggctgaaggctaccgtcccatcgttccgaagttggtaatctgaatggaaacatcatagtcaaaggccgcttcggagaaggtctcatcccaatgatgctttactttcttccaatagtcgggatattgaatgcggactctgtcagaaaagaatacagggtccgtttcatattgattctgcagcttatcgatgacttctttcacatcgcttttcagttttttttcgaaaatcttttccagcccgtttaaatagtgctgatcgaatgaatcttctccggcatattgatcctctgacaaaagtccttttgtttttaccgctacatgaaatgacagcttcccgtttttcagcctgggagtgatggcggatgttgattttttgatctcgaaggtaatcgggtgcccccctttatccaaagcgggcagcacgccgccccgtatcgtccccatcagccaattcaggctctgtatttcgtatgatgacagaaagcccgccaatctgttttgttttgcgtttttgataatggccgctccgtcatacaccgtttttcctttttgattgctgacggcctgaatgagaaaactgagtttattatggcagtaaatcgaagctctcccgattcggagcggttttaaaatcttcccgttgtagccgccgttgttcgtaaggtcgatcagcttttccgcggccatgggctgctgctgattcggcgtcggctccgtcagaatatcggacgcttttcctcttgccgcgaagagatagctgctccgccttaattcatcatcgcggataaaatgattcatcatctgcagtatattttggtcggccagcaatttgtcgctgaatatcagcacttttaagtgatcgctgtaaacaggcggatcttttaaagcgacttcactgacggcttcaagaatggtatccccccgcgtcgtcacattgacaaacacgggccggccggaagcctggctgttttcgctttggggcagcaggttttgataggttaatttatatcggcggtcactcgtctcgtctatcgccagcccccgggcgaaagacagcttttcgacttccttcgcgtcccagcatcctgaaagcgtcatcagtatgaaaagcgccgccgcccattttatgaaaagtgtcatgacgtctttttcctcccggctatttttttcatccagctgacaaaccagatgagaaaaggaatcataatgacggcaaaaaacgcatatccgagaatattcgcgaatgcaaacacactgttgatatcatcggggtacattgaaaggccgaatgtcactgccaataagcctcccagcagccaggcattgtttttatttttcagtctgaaaatggtgtttaatccgagatgcgcccctttaaaagagccgagcatacaggtaaactgctggcatgtccacgtgattaaaagaaagatatcaaaccgctcaatgaaaatacccctgatttccaaggcatgaatcagggaaatggtcggatacgtcaccgttttggcttcagcgaccgacatacagccgatgacgacaagcagcgtaaagctgtaaaaaatgctggcgcctgcgatgccgaagacagccgcctttttcgcctgcttcgggtttttcataaacggcaccagataaagaatcacctcaagtcccgaaaaatacagaagggtccgcggaaacagctcaaaaaagcttttgtagcctccttccatgaccgggcggacgaaatccagcttaaacagtctcaaactgaatatgagcagcgtaatcagaatgacgatcgcaatcggaaacagataggcataaagctttgaaatgggatagaccccgccggtcacatggtaaatgccgaccgccagaaagatgaatatgacgacacccatcggcgtatttttcagtaaaaagtaattgatgacttcaccgagaaaacgggcttgaaaacagacggtgacgacaaaataacagctgatgaataaattcagaagagaaccgatggcgcggcccatgatgctttgattcagctcataaatggtttccccgctgtttttctgcaaaaacggcataaagagcaggacgatgccgataaacacgacactctgcacaagaataatgatccatccgctcggactgtccgctgttgcggcggagcgcggcagtgttaacacgcccgctccgatcattgttccgcttaccatgagaagtgtctgcataaacgacagcttgtcttccggttttttcatggggatcacctttgcttgattttatctttcgtctcttttctggtcggccgttttttcaaaagaggcgtcggcagtctgacgatcgtatcttttaagtcttggccaggctgcgccatgatcggaataagatagtcctgaccgaagcttttcaggcgcatcagatggccgatgacaagcagatagcacatgatcagtccgtataaacctaatatcgccgacagaatcattgaaaaaatacggatgagcctcagcggaaaattgaacgcataggagggcgccgtaaaagaagccaacgccgtaacggatacgacaatgaccatcatcgcgctgacaatattcgcctgaacggcggcctgtccgatcaccacgcccccgatcaggccgatcgtctgtccgatcggcttcggcagcctgagtccggcttctctgatcatctcgatcgtaaaaatcatgatgaacgcttcaacaaaaggagggaacgggacattcaatctgcttccggcaatcgtaaccgccattctcgtcggtaagagccccgtgtgaaacgtaacgagcgatatgtaaaggccgggtaaataaatcgtgattaaaatgcatgtataccgaagcagcctgagaaaggtaaccggaacccaccgctgattataatcgtcaggggagtggataaattcatcaacggtagccggcaccaaaagggtaaaaggcgttccatctacaagaatggaaacccttccttccaaaagagcgcccataacccggtcgggccgttcggtcgtcaagacggtcgggaaaatagaatacgtgttatcttcaataagctgctcgatcgctcctgattcgggaatgtcgtcaatggtgatggactccagtcttttcatcacttcttttacaacatcatcaggggcaatatcccgaatgtaggcaacggcgatccgcttttttgtccgttcgccgagtgtgatctctttgatctggaggttgggatcaccggactgctcgcgcaaaagcgccgtgttcgtccgaagcttttcgacaaaacctatcctcggcccccgttcaagcacttctgaagacggttcttcaatatcacgcattttaaatgtttccgtctcaaacgaaagagcttcctcccacccctccgccagcaaaaccgatttgccggagaaaatgtctgcctccgcgtccttaagtgaagaaagccgggtatgacgatagccgaaagagatggatgacggcggtgtttcagccggttcctcttgatgccgggcggccgcctgcacgggcgaaataatatattctgcaagcaattgattgtcggtcagtccgtctatatagataagacaggcgtcacatttgccgtttccgtacgtaaacgaataaaacatcatgtcatcgctttggccgaaccgttttttcagcgcttcaaggtttttgccgagctccgcatgtatcgtcacaatgttcccccctttccatcagttattttaatttgcgacaaacaaggcattttattctggaataggaaatggctgagcattccgccccatccgaatggtataatgagcaggtcagccattttatacatattgtttttaaccgcggctccctccgtgttttaaaaaagacacagggggaatgggatatgagccgctttttaaggggaggggaacgaacatgacgcaagagccgatttttttacagcctgtatgtaaagaaaaactatggggcggcacgctattacgcgaacgattcggatatgacataccttcagaaacaaccggcgaatgctgggcgatatcagcccatccgcacggaatgagcacggtcaaaagcggtccgtatcaagggaaaaccttgatggaactgtgggatcagcatagagaattattcggcggaacggaaggggaccggtttccgctgctgacgaaaatactggacgtcaaacatcatcagtctgttaaagtccatcctgacgattatgacgccgaggagcatggacagggtgaaacggggaagtctgagtgctggtacattatcgactgtaaagaaaatgcggaaatcatatacggtcacacggcccgttcgaaagcggaacttgtcaccatgattaacagcggtgactgggaaggcctgctgcgccgtgtgaaaatcaaacccggcgatttttattatgtgccgagcggaaccatccatgccatttgcgcgggggcgctcgtgcttgaaacacagcagaattcagaggccgcctaccggatatatgattacgggcgtacagatcaaaacggccaggcgcgtgagctgcatatccgcgatgccgtcaacgccgccaccgttcctcatgtggacggatttttagatgaatcaactgaaacgagaaaaggcgtcaccatcaaaacctttgtgcagggagaatatttttctgtatacaaatgggatatcagcgggacggcggaaatgacccaggacgctccgtttatgctgtgcagcgtcacagaaggaagcggctccatcctctgtgaaggcaagtccgccaagcttgaaaaaggcgcgcatttcatactgccggatcagatgcctgactttacgataaacggagattgcacgatcatcgtttctcatatataaaaccaaacttaatcccagctctgggattaagttttttttatttggaaaattgggtgatttctctctgtaaaaatgaagaaggccggccgataaataaactagtttgatagaaaccaattgaatcagaaagaggagaaggaatgaaaaagagattcgttgcacctatgttattgtccgccgttttccttgtcttttgcacccttacacagcccgcagaggccgcatacagcgactactccgtttacgagctggaaacgaagcagcaatttgcttctgagaacgaggcgcttcaagcggcagcgaaattgaaaaaggatacggggtggcaggctgacgcaaagaaagccggaaatacgccgctcacttatcaaatctcagcttcaggattacaagatgaaacggatgcgaaaaccgtgctgaaagattttacgaagcagacgggcgtgtccggcacttacagcgcaagcggaagcaaacagccgtacgtgaccgtcacatcaggcgttctatcagacgagcggcagacgaaaaatcttcttgccgaactgacgaaaaaaacgggcgtgaccggcgccgtcaagccggcggggacaaaacagccgtacatgcaggtcgtgactgctgagatggcggccgaagcggacgcaaaagcgctctcgcaagcgttgacgaagcagacgggcgtgaaagcgtcataccgtcagatcaaacgggaaacagcccggtttcagatccaatcaggaacaatctccggcgatcaaaaagccgctcaaatccaaactgattttcaaaaggaaacaggattgcaggcgtcgctgaaagtcacggcaaaggccagtccgaatatcaccgtgacagcctctgacatttcaaatgcaaatgatgcggcaggtttagcgaaacagctgcagcagaaaacgggcgtcaaagggaatgttcaaaagtatgcccatagcaaaacagcaaccgtgtacaacgtgcagtcaggatattttaacggagtaagcgccgtacaaaatgctatcacccaaatcaagaagaatacgggtgtgagcggaagctatcaaaaagccggcaagaaaaataattacacggtcgcgatgagcggactgacggctaagcagctgcaaagtgttcaagctttctttaaaaagaaaaaatggcattgcgacgcatcgcctgtcaaaaagacagcatcagtgtccgtttatcggatcacggcagggcagcttaccgctgcaaaggcagatcaaacggaggcgtttttccgccagcagcgtgtaaagacggcaagaaccgcggcgggaaaaacagcagaaaacgaatatcagctgctttctcagcagacggcagaccagtcgaggataaaaaaaggattgaatctgctggcgggatataaactgactgccatttcaaaaacgatatccaagcagacggacacaacgtaccaagtcacaaccgaatcactgcttgatacggcaaagatcaatcgttcgctggactttttcaaagggaaaaaagtatccgcctccgcacagaaaacaggtgaagcagcgtatacacaattcagaattgaaacggcaccgctgcttaaaagggaagacattgaccgcgtgactgcttttttcaagcaaaacaaagcggccggcactgtgaaggagacggggaaaaccggctctgcacagtacgtcatcaaaaccgatacattcagcagtaaaaccgttttaaataaaagcatgagctttttcagcgccaaacaattacaggccggctatacgagtgaaagccatccggtttatgaactccgcattcgcgatcaattcacgggagcgcagtcagcggacgccgcctcccaaaagctgaaaaagctgtacggatggatgatggctattttgaaaataaaaaacggaccgcaaatcatgaataccaattacaacatctcgctggcagatatggtcaaaaaacaaatgacagtcagcccgcagactgatgccgcggcttatgcatcacttacgtacatcaatacggcctccggaacggtcacagccgacgtcctgaacgtccggtcaaccccggaagtcagctccggcaatattatcgggcagttgaaaaaaggcgataaagtcagcatcacaggccagacaaacggctgggccaaactcagcatgggctggagaaacgccagcagtgacgaagtcgggcagtatgtcaatccggctcacttcgcacaagacagcaagtattactttcaatttctgaagctctctcagacagccggactgaacgcatcggaactgaatcaaaaagtgctggtcaataaaggaatactgacagggaaaggccaggcctttattacagccgccggcaaatacagcatcaatgaagtgtatttgatttcgcatgctttgcttgaaacgggcaatggcacgtcagagcttgcgaacggcattatgtataatggtaaaaaggtttacaacatgtacggcatcggggcttatgacagcaacccgaattactacggcgcacaatacgcgtataatcaaggctggtttacaccggaagccgcgattatcggcggagcccaatttatcggtgcgtcttatattcacaatccttcatacgagcaggatacgctgtataaaatgagatggtctccagccgcggcccatcaatatgcgacagacatcggctgggcgtataagcaggtaaaccgcatgtacagcttatactcactgctggatgactatacgctttactatgatgttcccgtgtatatgaaagtataaaaaaagggctgaagtgtatgcttcagccctttcttcatgcaaaaaacacccgccgtcggattcaggcaggtgcttcagcacaattcttcatttttgtttccgcaaatttcaataacgcttcactcgaattcccatctgaatacatattccatttgtctgagaaccgcttcatttcttctgcacgaaatggctttttcgtcatttcctccagaagggcttcgctgtcatgacaagcctttccgggaatgacggaagtataattgtcgattaaaccgcgttttcgatcatattcctccagatcatatgtgaaaaagaaaatcggtttatttaagagcgcgaattcaaaaggcacggaagagtaatccgtaattaaaatatcagccgctttcaagagatcatgaagacgcatgtcagacacgttcttgatcagttcgctttcaaacgaagccgaaatctgatgcaaaacggcagggtgaagctttacaagcagcatatactctccgtttaacgcgtttgtgagctgttcttcggtgaatggcagccgaaaggattgcatatcataatccctgaatgtcggtgcgtacaggatgatttttttcggccatttgtgcttcagttcgggcttgtgttcttcataatagacgtcagtcagggggacacccgtttttaacagctggccgtcccgtatgccgaacgactttttaaaaacgtcagccatcgcgtctgaaccgacggtgacaaagtcaaacgagcggtacacttttttaaaccggctgatatctgatgccggacggttttgattcgtcacatcctcaaggccgaactttttcaaagagccgttcgcatgccacacctgaatgcatgtcgtttgcggccggcggtttaagacgcttgtcatgaggaaatagttatccgttatcaccgctttgctcttaaaaaggatcaaaacagccttcaaaagatgcagcggatgtttttcgttcagataaaaagagccgataccttccagctcttttttcagactgacggcatgtctcgtatacaaaaccgtcatttcataagaaagcgattcagcgtgcgctttgtaagaacggatgagagcctgcgcattctcttcaaaagataccagcagggtcagatggttcttgggctttacaggcttgaacaaaacgccgagaacagacagatatatagaataaaaagcggcgaataaagatcgcaagttcatagattaccaatctcttttgctgttttatttgtttaaagctgtttcgtttgatcttcttcctgcttggaatacaggcttttatttgatttattatttctcaaaacggtaaaagcatacttcggaatgttcagcatccttttccatctccacggattcgtcaccagtctgtacagccattccagattcgttttgatcatccattcaggggcgcgtttcaccgttccgctgaacacatcaaagcttccgcccaaaccgatcgatacagcttgagggaaaagatgtttgtattcataaataaattgttcctgatggggatatcctaaggcgacaaacacgagatcgggtttcgcccgggaaatctgtttggcgacgaagcgtttatccgcttcataaccgttgctggctccgacaacctcaatattcggatactctttgctgatccggttcaaaacggcgtcaagcacgtcttgtttagctccgtataaaaatatttttttagactgccggtttgcgaggccgagcagcgcaagaaacacatcgaatcccgcaattcttgatttcagcgggtgctgcgtcaaacgtgacattaacacgacgccgataccatccggcaggacgaaatccgcggaagaaatgacttgatgataacctttgtctttcgccgcagcgtatccgatctcaggattgaccgtcgcaatgacggctccttgcttttgtgcgatataataagtgtctaaatatgaaataaactcctgtaaatttccattaacgtaagaaaggttgtgcaccatttcagtctgcatctgccgtcctcctttttgtacgggattttctttcactttttcgtgaattaggctaagctttattttaacataataccttcagataaacttaacaatagttttacaaaaatataaataagataacaatttctttaatcatacgcgcaaaaaccctgctaaactcctattgtaataacatttgttaataagtggaatgtaacttcattttacattggcttaaccttttcagggctatgtgatataatgaggttccatgagtacgaaattggcactttagtgattaaggatacagctgcgcagcatttcagagcagttgcttgttatacgtatgatgatagaaaggagcttttgtttcatgaagaaggtcattacttacggaacgtttgatttactgcattggggtcatattaaactgcttgagcgcgcaaagcagcttggagattaccttgttgttgccatctcaacagacgagttcaacctgcaaaaacaaaaaaaggcctaccacagctatgaacacagaaagctgattctggaaacgatccgttatgtcgacgaagtcattccggaaaacagctgggatcaaaaagtacgtgacgtagcggatcacaacatcgacgtgttcgtaatgggagacgattgggaaggcaaattcgatttccttaaagatcaatgcgaagtcatctacctccctagaaccgaaggcatttccaccacacagattaaaaaagaaattgccggggtgtaattgaaacattcggatatacagatgataaagaagtactccctccggatagggagtacttcttgtaatataaggttattttcgctatatttgttatgcgcttttgaaaaaaagctagacaataagaggagaatttaaagatgaatcttagtaacttttttaagttgaataaaaaagagtccaagccgtccgtagaagaacgcgaatataccattttaaacaaagaagcattggcggaagagaagaaggtagcggtagtcgttcctgtttataatgcagaagaatatgtaaggaaaacagttgattcagtgatccttcaaaacatcggctttcagcatatttctttaattcttgtcgatgattgctctactgatgattccagaaacatcctgactgagtacgccgagttgtatgaaaatattacagtcgtctttttgaaagacaacacgggaaccccggcttatccgagaaacttggggattgagctggcaaatgcaaagtacattacatttttggatgcggatgattggtttgcgccgaacggagttaaaatcttattcgacatgcttgaaagagatcaggtaaattatgcggtcggaaaaacgatcgaaatgcaggtgaacggtcaaaaaacgatcgggaaacatgagtcttctctgaacagagcgaaggtatcgcctttttcaatccggcatattttctatcatctcggcccgcgggcaagaatgatgaacttacaatttctaaaagataatgatatcagatatccggaaatgaaatttgctgaagataagcaattttttatggatgttcttttggcgtgcggagatatttcaacgtcaaccgagccggtctattatctgaacagaatggacaataatgagtcgctgacaaagcagactaatataatggaaaaaaccgacacgaacatagccgtaatgaagtatattctgaacaaaaaattagatactgaaaaagagaagatggcaatgaaccgcctgatcgaattcgattccattacgcgtcttttcgatcggatgcacttcctgaaaagcgaaaacaaagaagcctactacaataaattcaatgaaattctgaatgtgttaaagaagacgaaatacgatatttccgagacattttttcatccgattcataaaacagcctaccgtctgctgactcaaaaacggtatgatgaggtcgaaaagctgttccgctggtccaaaaaagagcccgataaaaacatcgtgacgcaaggcggactggcttatttagaaagcccgctgacggatgaagaaaataaactggtcgaacttcgcatgcacggagaaacggaaagcgcggtgttcgccgatcataaattcaccgttacgttccgcttgttcggacaggacagaaataatgcccaatatattcagtttcagcacagagataacatgaaagtattccaccagtttccggttcagtcactgggagacgggcggtacgtccttgaaatcccgttacgtgacattgaaaaagtcggacttggcggttatattatgtatgtcatttataacgattatgaacgtgtcatgttaaacagagacgacggtgaaaaggtgacggcagaagcgaacggactgcaatatcaattctaccggacggtgaaggagaacctttcactgaaagtaacaaaatgatgattgtgattggatatgtttaattgaaacagaggagtagacttattttatgggtatagaaaatcctgtcagatacaagttaaaacatcttaacataaaggaagagacattcagcattacgatatcctgtgaaaatgtcactgcaggggaagagccttctcttcagattataaatcgtaagacaaaagcggaactttccgtccctctgaaacggttggccggagaaggcggggagtaccatgctgtcatgagcacggatctgctttctgaccatacggacggcaaaggatgtctggatttctatgtctcctttatcaatgatgacagtgatatcagtaaaaaacggttaaaatccagccttgaacctattgaactgtcttcttataaagatgaggctcatcatatgttctttttcccttacacgacgaagaaagggaatttctccttaaagctgctgcagaaaaagtttgtcacgcggattgatgaaatggagctcgaatctgacggcagcttacatctgaaaggttttgcattccggctgaatgcggcagaaaccttaaagataaaagaaaaaaacctgattcttaaaatgaaaaaaggaaaagaagaggagcctctcattctgaagtatccgcttcacgacgtgccgagacacgaccttgatgaatatgttcaggacacaacgatgcttgacacgataggctttgatacaaaaattgatttgaatgctgtttataaagaattgaatcagcagctaacctttcaattccatattcaattcatttttgaagatgccgggacgggtgaagagattatcaccaacagcaaaccgttaaaggttctgaaatctgaacaagtaaaccctaaccaattcacgatcctgaaaacggagaaagggcctgccagatttcacgttttcacgaaaaagaaaacgaaaaatctccacctgagaatgaacgattacagcttcagcacccgcgtggagtattttgtgaaaggaaagctgaaacggggcgtttcctttgtacgcaagagaaagaataagctgaaaaagttcattgagaaaagaatacaaaacacttataaagcgggattcagggttgcggggaaactgcctgtcaaacagaaatttgtcatgtttgaaagctttgccggaaaacagtacagctgcaacccgcgggcgatttatgaatacatgagcaaagagatgccggaataccgtctctgctggagtgtaaaccccgcttactcacagacatttaaagataaaggaattccttatatcgaacgctttacgttcaaatggctgtttgccatggcaagagccgagtactgggttgtcaacagccgtatgccgctgtggattccgaaacctgagcatacgacatatgtccagacatggcatggcacgcctttaaagcgccttgccgtagatatggatgaagtgcatatgccgggaacaaacactgaaaaatacaagcgcaactttacgacagaggcttcaaagtgggattacctgatttcaccgaacgcatattcaaccgaaatattcgcccgggcgtttcagtttaataaaaccatgattgaatcgggatatccgcggaatgacttccttcaaacggataacagcccttctgtcatcaaagcgctgaaagaaaaaatgaatcttccgcaagataaaaaagtgattatctacgcaccgacatggcgggatgaccaattttataagaagggaaaatacaagtttgaccttgatttagaccttcatcaattgagagaagcgatcggcgatcgttatgtcattattttaagaatgcattatctcgtggcggaaaactttgatctcggaccgtatgaaggatttgcgtatgatttctccagctacgaagatatccgtgagctgtatatggtctctgatttactcataacggactattcctctgtcttttttgactatgcaaatctgaaaagaccgatgctgttttatgtgcctgatatcgaaacgtaccgggataaactgagagggttttactttgactttgaaaaagaagcgcccggcccgcttgtcaaagaaacaggtgacgttatcaaatgggtcaatgaaacggaatcagatgattataggcttccggattcattcgggcctttttacgagaagttctgttatttagaaaccggggaatcgtctgaaaaagccgtaaaagtgattttcggggacaagtaaataagtgcaaaaaagcataatttaaccacgttaattatgcttttttgcttaagtgacggcatgttgcgctcatgggactcaggcttgttatgaagtgaaaaatacatcgtaatctgttacaattatgagcggtgcttttgtaagtcaaagctattacctaaaacttacgactaaggaagattagaatgaatgcattggtaaaaattctgaaagagcaattcaactcatttccgctgattatgcggcttgcagtgtacgaaacgaaatcaaagtatcaagtgaactatttgggtatattgtggcagtttctcaaccctatgattcaaatgctggcttactggttcgtatttggtctcgggattcgcggcggacatgatatggtgcttggaaatggagacagcgtaccgttcatcgtctggatgctggccggcttaattccttggttctttatcagtccgacgatactggatgcatctaacagcgtttttaaacggataaatttagtgtcgaaaatgaactttccgatcagttcactgccttctgtagtgatagcatcgaatttattcagttactttgtgatgatggcgatttatattattgtgctgctgagcaacggactgtttccgacgcttcactggctgcaatatatttattacttgttttgcatgatcagttttatgtttgctttcggcctgtttaattcaaccatcagcgttttaatcagggactatcagtttttgcttcaagccgtcacaaggctgctcttttttcttctgccgattttctgggacattgcggagaaattcggaaacagacctgaagttttgaccatcttgaagttaaaccctcttttctatattatcgagggctttagagacagctttatggaagggcagtggtttttccacgatgtgaaatacacgctgtatttctggttcgtcacactgctgttattaacagtcggttcacttcttcatatgaaattcagagataagtttgttgactttctttaatatagtaaggagattatacgatgaaactaaaagtttcgttcagaaatgtttcaaaacagtattttctatataaaaaacagtctgacaaaattaaaggactgtttttcccaaacagaaatcaaaaaggttttttcgctgtccgaaatgtttcttttgacgtctatgaaggggaaacgatcggattcgtagggatcaacgggtctggaaaatcaacgatgtccaatctgcttgcaaagatcattccgccgacaagcggggagattgacatgaacgggcagccgtctttaatcgcgatttctgccggattaaacaatcaattaagcggtaaagacaacattcgtttaaaatgcttgatgatgggtctcaacaatcggcagatagacgagctttatgaaaaaatcgttgaattcgcggatatcggcgactttatagatcagcctgttaaaagctattcaagcggtatgaaatcccgtctcggttttgccatatcggcgcatatggaccctgacatccttattattgatgaggcgctctcagtaggggaccagactttctatcagaaatgtgtggaccgcattacggagtttaaagaacgcggcaaaacgatctttttcgtcagtcattccatcggacagattgagaaaatgtgtgatcgggtggcttggatgcattacggcgaaatgcgcatgttcgacgaaacgaaagccgttgtgaaagaatataaagcttttgtggattggttcaacaagctttcaaagaaagaaaagaagaaatatcaaaacgagcagattgaaggcagaacgcgggcagccgaggaacagaaaatcagtcaggcgcagcaaaagaaagcgaagcccaaattcattgccaatacgatacagattacgctgcttgcattgctggctgtcggcgcaggcgcttcgatgttttcagacaagcctctgcgtgcgattacatctttcggtgacgtcaaacagagcgatgccggcctttatgagtctgtgaataaacctgctttggtaaaagctgaaaaggcggacctttatactgaaaaagatataaaaggaaaagcctccgcaagtgtaaatttcggcacgaaggtgcaggtagaagccgaaaataaccaggcggccaaagtgaaattaaacgataaagagtactttatgaaaaagactgatctgtataaagtgaacgctttaaaaaagacggatgttcagcttaatgatttcagcggcagtttatcaagccaaacagcagaagagtttctctcatatctcaataaaagccgggacgatgtacagagtaaattgaaaaatccagctgccggacaaacggctgacggacggaacgtattaaaaacatccgatgcaaaaacggatgtagtgattgacaaggatacagtctccgaagtggtttttcatttatcgcgtcccgcagacatctcagctttaagtgaaaaaggcggcagcaaaatcaatcagaatttgctcatgcttaaaaaccaggaatatactttttctgtgaacaatgctgataaaacactgaccgtaacgtctaaaaagtaaagatcacataaaaaaagctgccggattcggcagctttttctattcgtcagcttcttctttttcaagaagatccttcatgaacggaattaatttatggcggatatcctgatcctgtaaggcaaattcaagcgtcgtctcgataaatccgagtttttcaccgacatcgtaacgttttccttcgaaatcataagcgaagacacgctgaatgtcattgagcttttggatggcgtccgttaattgaatttctcctcctgcaccgacttcctgctgttccaggtacatgaaaatttcaggagtgaaaacgtatcttcctaaaatagccaagttggaaggagctgtgcccggttcaggcttctctacaaaatttttgacctggtaacggcggccttcatttgttaacggatcgataattccgtagcggtgtgtgtcgttttcaggaacttgctgaacaccgatgattgaagacaatgttttttcgtattcatccatcagctgacgaagtcccggtttttcagcctggacaatatcatcgccgagaagaacggcgaaaggttcatcgccgatgaagttgcgtgcgcaccaaacggcatgaccgagtccttttggctctttttggcgaatatagtggatatccgcaatatttgacgattttttcactttttgaagcagttcgattttccctttttcttctaaattgcgttccagttcaggggcattgtcgaaatggtcttctattgctctttttccttttccggttacgataataatatcttcgatgccggattcgacagcttcttcgataatatactgaattgtcggcttatcaacgattggaagcatttctttaggcattgcttttgtggccggcaaaaaacgagtgcctaaacctgctgccggaataatggctttgcgtactttcttcactgaataacaccatccttgtttctgcaaaatctttttttcagaactataacctagtctttttccactttaccacaattgattaaaattcacaccttttaatccgctttcaaagagtcttgtaacggtttttgctttgtttgccattaagctttacaatatctaagaaacggcataaatatgttaacatgaagggatatccgacatataaaacgaggtgcagacaaaccgttgaaaaaactaaaagtaatgaccgtattcggtacaagacctgaagcaattaaaatggctccgctcgtattagagcttgaaaaatatcaggaaattgattcgctggtgactgtaaccgcacagcacagacagatgctggatcaagtgcttgaagcattcagcattacgcctgattttgatttgaatattatgaaagagcgtcaaacgctttcagaaattacatctcatgctttgctgaaactggacaagctgttccaagaagtaaaaccagatatcgttttggtccacggagatacgacgacaacgttcgccggaagccttgccgccttttatcatcaaatcgccgtcggccatgtggaagccggtctgcgtacgcataataaatactctcctttccctgaggaaatcaatcggcagatgacgggcgtgatggctgatgtgaattttgcgccgacaagccaggccgagcagaatctgctttctgaaaataaaaagccggattctatatttgtcacgggaaatacagcgatagacgcgcttcaaacgacagtgcgggaagattattttcatccgatttttgacaagctggaaggaagcaggatgattcttttaacagcgcacagacgtgaaaatttaggcaggccgatggaacagatgtttaaggccgtcagaagagtcgttgaagagtttgaggacgtacaagtcgtttatcccgttcatttgaatcccgcagttcgtgaggccgcagaagcccatttcgctgattcggacagggtgcacttaatagaacctctggaggtcgtggatttccataacttcgctgcgaaagcaagtttcattttgaccgactcaggcggggttcaggaggaagcgccttctctcggaaagccggtcttggtgcttagggacacaaccgagcgccccgaaggagtgaaagccgggacattaaagctggcgggtacagatgaagaaacggtgtatcagctgacaaaacagctcttaaccgatcaggctgaatatgaacggatgtcaaaggcgtcaaacccttatggtgacggatcggcttcaaaacggattgtggaagaactgctttatcggtacggctatagaaaaacccgtccgcagccttttacagaataaaaaaactctgcatcatatgcagagttttttattatttcaggctttcttttaattcttttttgactgaagcgaggcttgcttcatctaatttgtaataatagatattgttgattctcgttcccgttcccttcagttcatgctgagtgactttgctgcgggcgtttttatagtcagtcataaccgtccacatatcatcgaatgacatgtttgttttcatattgttttcaatgaccttaaacatatctccgaatttcgtgacagacgagatgtttgcccctttagaaataatcccttcaatcacttggcgctggcgctgctgcctgccgaaatccccccggggatcttcttttctcatacgcgtgtaggcaagtgcttcttcgccgttcaggctgatgttccccgttccgaaagagtgcccgtcgtagttgaaggcaaacgtgctgttcaccgtaatcccgccgagtgtatccacggtatctttgaagctctccatgtttactttcacaaaataatctaccggcacgtcaagcaggtcctcgacggtatccgcggccatctgcgttccgccgaaagcataggagtggttgattttatccatcgtacctttgccggagattttcgtatacgtatcacgcggaatgctgaccatttctgttgtattcgttttaggattgacggtcatataaatcatcgtatccgcgcgccctttgtcatttttccgctcatcgacgcccatgattaaaacagaaatcggatccttctttccgagatctatatccgtgtcacgtttgtccgattttttcaagtcttcctgaatgcttgccaccgttgaagccgctttgtgccacaagtagtagacgtagcctcctgatgataaaactaacagcccgatgattgttacgattgtcagaagaacttttttcttctttctttttcgttcagctctcatttgtcatcaccttttctattaactttcctgatacaatttactaatctttataaacccagtcatatttttacttataaccatgtaatagacgaaattcttaaaaaaaggttacaaaaagaccttaaaattaccttaaaaaaaagttagtataagacgatacataaagatgaggtgaaaaaaatgaaaaaaactattgcagctacgttcttaatactgcttttttctgttgtattggcagcgtgcggaacggcggatcaatcaaagaagggaagcggttcttcggagaaccaggctcaaaaagaaacggcatattatgtcggtatggcggatacgcacacaattgaagtaaaagtggatgatcagcccgtcagctttgaattttctgatgacttctctgatgttctgaataaattcagcgaaaatgacaaagtcagcattacgtatttcacaaatgataaaggccaaaaagagatcaaggaaatcgagaaagcaaaataatacaccatgatcagcaaaaggcgggataaaaattgaagaaaacaatatgggctgtctgtttttctgtgatattcagcctggctttattaccggaaagcacttttgcgtccagttctgatatctcagtaaaactgacgaattatattggtaataaatcgactctgaatatcgaaccttcaggaacttataaactgacgggaagcgatgtctcctccgttgccagattgggaggcgcgtccaaatatgatacggctaacgctgcgacatccaagtattggaaaaacccatccaacgtagtcgtcgttaatacggatgcttattttgcggacacgctttccgtcattcctttagcgaataaactgaaagcgcctgttctgctgactgaagcgaaaaaactgagcagcagcacagaagcgcaaatcaagaaattcagtccggataatattttaatcatcggcgggacgaacagtatttcgtcagccgcggaaaagacattgaagaaatacggccgtacgaaacggatcagcggaaaaaacagatatgatctgtccaaaaatattgcggccgaaatgggcagctatgaccaggcggtcgtagtaacgggggatgtatatacggatgcgctggcaatcgcgccttatgctgcgcaaaacggctatccgattctcctgacgaaaaaagactcccttccgagctacaatctgcctaaaaaagtgatcatcatgggaggcacttcaagcgtcagcaaagatgtggagaatcaaattaaaaagaaggcctcggtcaccaaaagaattaccggatcaaacagatatcaaatatcagcaaacgcagtcacttcgctcggcatggatgcaagcaaaacggtggctgccaacgggactaaattagcggacatcgttgtcggatcaaatattgccgccgcaaatcacatgccgcttgtatacatcaaaaaaagcgaaacacccgccgacgaggccagcctttttaaaacgaaaggcacctattcttatacattaataggcagcgcaaattcaattgccgattcagttaaggctgcttacgcaaaagagttttatctcgtaaacggaaagacataccgtattgaaacgtccggcggcaaattaggcgttgcaggcattaacagcggaaaaacgtctttcaaggcggttcctgaaaaatattcaacagcaaacacaatcagcattgacgggaagccatatctggggaatatgagtttcactgcggaatccggcaaatatgtaagacctgttaatgaaaacattccttttgaggattatctgaaaggtgtcctgccgaatgaaatgccgggaagctggccgacagaagcgctgaaagcccaggctgttgctgcccgcacctactctatcggcaagatgggacaaacagtcgcggatacaacggcctttcaggtttacgggggatacagctggtatccaaacgccaccgcagccgttaacggaacaaaagggaaagtgctcacttattccggcagattgatagatgccacttactcatcaagcaatggcggttacatggaatccggcgatgaagtgtggggatcgaaagtgccgtatttagtagccaaaaaggatacaaaagatccggaaatcagctggtctttaacattgcagaagcagcagctgccagcgggtctggatatgaaaaaccccgcatcctggtggtctaaaacaaacgaagcaaatgccgcgcagctcaacggaataaaaaattggctgatgaaaaataaagaaaccaatgcaagttccataaaaattgcaagcatctctgatctctcgctcaccggaaaaacaaaaggccagcgcgcggaagacgccgcggtgaaggtcacgtaccatgtgaatgacaagtcgaagggctatgtcatgaacaagactgcatctgttgaggtgaaagcgtctgaactcaggacgatgatcggagcttcatcttttaaaagcacatacgccagtgcgtccggtaattcttcgcaaatcacgatatcaggaaaggggtacggtcacggcgtaggaatgagtcaatacggagcaaaagaaagagcggaggccggagagccgtatacttctattcttgcgttctattatcctaatacagcacttacaaactactaaacttctgtggaggagatcggattgaaattcatcataaaatgtctccccgtctttattctcggggtcattctatttgtcccttccgctttggctgacaacacggttaaaaggatcggcggaagcacccggtatgatacggctgtactggcggcaaaacaatcatggggtgaagcgaaaacggtcattatcaccggcggaacttcatatgccgatgcaattgccgctgcgccgctttcatatcaaaaaaatgcgccgctgctgtttacaaataaagatcagctgtctgccggcacaaaaaagggattaattgatttaaaaacgaaaaatgtgattatcgtaggcggcacacctgccgtttcgaaaaatactgaaaatcaaattgctaaattaggcatcagtgtcaaacgattatcagggagcacgagatatgccacagccgcaaaagtggcgggtgaaatgacaagatcttctacagcccttgtggtcaacgggtttgttgatgcagatggaatggctgcgatttcttatgcgtccgctaaaaaatatccgattttattcactaatgattcgacattaaatggttctacgtccaatgcgatcaaaagcttggggattaaaaacacgattgtcatcggcgggacaagcagcatcagcagctcactttacaataaactgccgaacccttcaagaatcagcggcaaaaaccgctataacctgtctgtgaatcttgcaaaaaagacaggcttaagcacaggctatacgtttgttaccaatggctttaaagaggcggataccatcgtcggaggcgtgctgagcgccaaacagggaagagttcacctgctgacgaatggagacagtctgtcaaaagacgtccggacgtatatcggaagtaaaaacatcaccagcttcactgtcataggaagtgcttcatctttaagcaacaatgccgcgtcacagcttaaaaatccggttgtcggcaaaacggtctttattgatccggggcatggctatcaggattcaggtgcaaccggaaacggcttgcttgagaaaaatgtaaaccttgatatcgctacgcgtcttaacaatcaattatacggcgcgggcgcgcttactgtaatgtcgaggaagggcgacacctttgactcgcttgaggagagagtgaacaaaggggcgaaggcgaacgccgatattttcatcagcgtccatgcgaacgcaaatgataacagcagtgcaaacggtacggagacgtattatgataaaacgtaccaatccgcaaacagtctgaggcttgcccaaaatattcagccgagaatggtttctgctctcggcacgcgtgaccgcagtgtgaaaactgccggattttacgtcattaagtattctaaaatgccgagtgtcttgttagaaaccggttttgtcacaagcccgattgatgccaatattttaaaacaatcaacgaaaaaggacagactcgcggcggggatcacccaaggcgtttcctcctatttccgataattttttcatggaaacagaccggttcataccggtctgtttttttatttttcattatgctttgtctcaaatatggatatgaatagatttacaataaaaaaacaataatcgaaacattctaataaacattaacgcttcctttacttccaattaacatccatctgctaaactcacggcataggtcatcaaacatcccaacaaatcgtgaggtgtgtgtcagtgggagcagagaaaagcatgaatgtaaataataactatgcagtgcggcaggggacttccgctgccgttacggaaagaacggcccgttatttggcttttaagcgattcatggacattgtgtttgcgcttgcggggctcttggcggcgctcccggtgatgggcctgttctccatactgattcgtttggagtcgcccggcccggctttttataagcaggagcgggtaggcaaagacgggaagccgttttatttgtataagctccgctctatgaaaatagatgctgaaaaatcgggggcggtctgggcgctgaaaaaggatccccgcgtgacaaaggtcggcgcttttatcagaaggacccgtattgatgagctgccgcagctggtaaatgtgcttcggggagaaatgagcctgatcggcccgcgtcccgagcgtcccgtgtttacggaacagtttcaggctgagattccggggtttacggagcggctggccgttaagccgggattaagcggctgggcgcaggtcaacgggggatatgacatgacaccgagggaaaaactgatgtttgacttatattatatccgcaacctgaccttttcattggaactgaagattatgctcaaaacgtgcaaagtgatctggaccggtgacggggcgcgataaaaattctggtcagcagacaaaaaagtagggaaaacgatgcctagtattacaaatcaaatcttgagcggcgccaaatggacaagtatttcgacagcgtgtattacggtcattcaaatcgtccaattcgccctgctcgggcgggtcatgtcactggctgaattcggccttgtcggcatgatcacaacggtagtggtgtttgcccaaattgcgctggatatgggttttggcgccgcgctcattcaaaaagatcatgtgactgataaacagatgtcttccttgtactggctgaatatcataacggggcttgcgctgtttgcgctgctgtttttcagcagtccgctcatcgccgatttttatcggcgggaggagcttgtctatttaatccgcgtgctggccgttatgtttttaatcgcgccgatcggtcagcaataccagtatatgctgcaaaaagcgctggcatttaacacgttaagcaagattgaaatcttttcaaatgtgctgtccttcgtgtatttggcggccgcggttttttatacggacccgattctcgcctatgtgatttctcaggtgctgctgcaatcgtcgaaagggattctgtactggatggcctgcagaaaaacatggagaccggcgttggtttttgatctgaaaggaatgaaaggtttcttttctttcggggcctttcagctgtcttcccggcttgtgaaccggctcggagcgaatattgatatgattctgatcggcagttttatcggcgctgaggcgctcggcatttacaatctggcctaccagattgtcacgcttccggtattaaaaattaatccgatcattacgagagttgcgtttcccgtctttgcgaaaaacaagcatgaaaacagcgttatcagagaaggatttctcaatatgaccaaaatactcgcgctgatatcctttccacttttgctcggtttggtttcagtgtcggatgcattcgtggcttcggtattcggagaaaaatggctggcggctgtcccggttttaaacgttctcgccatcgtcgggatattaagggttctgatgaatccgaacggatctgtgctgctcgcaaaagggcgggccgatctggcgttttattgggacgccggggtgatgctgctgtatggtgcatctttgtacgccgccgtgctgtccggaaatctcttgacggtagcctggacgtacgctttcatcagcatcctgaatttcctgatcgggcgctggctgttggcatatgtcattaagctgcggctgtcggcttacttcaaagccgtggccaaaccgtttgtgcttacggcggcaatgggtgtcatcgcctttacagccagcttcggcacggagcggatcagccttgatgtcaagctgcggctggcgatctccgtagcctgcggcgcgttgtgttatttattcctgttaggaaaagcttatccgcatatgaaaagtaaattaagaaaaggacgtttgctatgaaggtattgtggatgacaagtgtctatccgagcagtgagaagccgggagaaggcgtttttcatgagacgcaggcccaagaactgagaaggcttggcgcggagatgaccgtcatttgtccgcggccgaaactcgccgcgccattccgggtgctgaaaaagacgtatcggcaaaaggatatcaggccggcgcatgaatggcggaaaggcgtgtccgtccaccggccgttttatcaggcggttcccgggcagctgaaatgggcgcagccgcataaaagaatggcggaatccattctttccgaaattaaaaatcatggcctgaagcccgatctgattcacgcgcatttcgccatgccgtcaggcggagcggccgccattgtgtcaaaggctttaggcattccgtatgtgctgaccttgcatggcagtgatgtcaatgtctatccgcattacagcaaaagcgctcatcgcgcatttacatttgcggtgcgggaagcagccgatatttacgctgtgagcggcagtctgcgggaacaaatgaaaaagcttatcgaagcggagtgcaccgtgcttccgatcggcatcacgcttgacgccttccgaaaaaggaacgagacgaaagaagccgtcagaaaacggctcggccttcctccggataaaaaactgatcgtgttcatcggcaggcttgtcaaagagaaaggtgttttcgacttatcaaaagccgctcagtcattggatgaaagatatgaagccgtctttgtcggtgacggttccgccgcatcttcattgcgtgaagccgctcatatcgtcacggggcaagtgccgaacgacaaggtacaggactatctgctggcttcggatgtaatggcgctgccgtcctacagcgaaggcatgccgactgtggtcattgaggcgctcgctctgaaggtgccggtgatctgcaccgatgtcggaggattggcttctttattcgggaaacaccgggggttgctgatcaagccgggttcacctgagacgcttgcagaatcgattctgcaatatgacgaaggagaggcttggacgccgcaaacagccgaggaactttatcaaaccgtccgcacgtattttgacgcaagccaaaacgcgaaaacgctgaaagagaaataccgatccgtaatgaaccgggccgggcaagaggagaacctttcgaaagagggatgaagctgtgaaaaaaatcgctgtattaggaacagggtatgtaggtcttgtatctggaacttgttttgcggaaatcggccatcatgtgacttgctgtgacatcaatgaagcgaaaatcagaagcttgcaaaacggagtcatcccgatatatgaaccggggcttgaggaattagccgaaaaaaatgtcagtgccgggcgcttatcctttacggccggcattgagccggctgtgaaagccgctgatatcatctatatcgcagtcggtacgccgatgtcaaagacgggtgaagccgatctgacctacattaaggcagcggcgcaaacaatcggagaacagctgaacggatacaaaatcattgtcaccaaaagcactgttccggtcgggacgggaaagctcgtttaccaaatcgtcaacgaagcgtcaaagggaaaatatccgtttgatgtcgcgtcaaatcctgaattcctccgcgaaggttcggcggtgcgggatacgatgcagatggagcgggcggtcatcggcgccacaagcgaacatgccgcttcggtcattgaagagcttcataagccgttccgtacgaagatcgtaaagaccaatcttgaaagcgcggaaatgattaagtatgccgcaaatgcttttttagccgccaaaatatcttttattaacgatatcgccaatatttgcgaacgtgtcggggcggacatttcccacgtgtcagaaggcgtcggtcttgacagccggatcgggaataaatttctccaggcgggcatcggattcggcggatcctgctttccgaaggatacaacggctttattgcatatcgcaaacgccgccggctatccgtttcaaatgatggaagccgtcattgaaaccaatcagaagcagcgggtccgtattacggaaaaattgaaccgcgccatcggtcccttaaaagggaaaaccgcggccgtactggggctggcctttaaaccgcacacaaatgacgtccgctccgccccggctcttgatatcatcacaagtcttaaagagcagggcgctcacgtgaaagcgtatgatccgatcgcgattcccgaagcgtcagcgatattaggagacggcggcattgaatatcacacagagctgtacagtgccatcaaaaacgcggacgcatgcctgattacaacagattggccggaagtcaaggagatggatcttcagagagtgaagcagctgctcaaacagccggtcatcattgacggcagaaatatgtttccgctggagtatatgagggtttcaggattcacttatcattccgtcggacgtccggcggttcatgccgatcggcaaataaaagaactggcaagatagaaaaagattgtcttcaggctctcggcagcccggctcggctgccggttttggaaaggggtttgccatgtgagtatcaaacgttcagcggcacatgttcttgtgctgcttgccgctctcattacaggaggattcatcatgctggaggcggtcagggcggatgccggcttcggaaaaatcaccgtgctgctgcttgccgccatgatcggtattgccggacttgctttgctatccgcctttacaacaaacggtcagatgtttatggggctcatttatatactgatcgcgtgtacatttttaaaccaggccttctttgcggtccatctcggatttttcagcttatttatataccggctgttattaatcggagcgggcgcccttcacatcgccggcatcctgacaaaccgccatcatattgacagatggaatcgggtgaatgtaaaaggggttctgatgtttttcgccttatggtttacatacggtctcctatcgttattgtgggcaaaatccgtgacgtacgggattaaatatttagctttaatgggaatgggcatgtttttgatttatcttattgtcatgttcattcagcgctttgatcagctgatggttttttacggcatatggcttgtgatgaccatttttgtgatggcgatcggcttttacaaccattttacacaccaccatctgccgagctccacgctttataacggcccgcagtacaaacagcattatccgacgtccgttttctttaatcaaaatgatttcgcaacgtttttgtgcatcagtttctttctgtatgcggcggcggtgaaaaatatgaaaaacggctatgtgaaggccgtcagcctgctctttgcgatctgcgctttgtatttaatcattttgaccggttcgcgcgcgagtctgctgggcatatgcgcgggggcggctgtatacgtcttcatcctgctgccttccctgttgaaaaaactcgcgctgtacgcagcgggagcgggtgcggcgctgtttgcggttttatttgcgggccgtatcaccaatgccgtcttgaatctgttttcagctccgcaggcgatgccgggacagcaaccgcttccttccaaccttgcgagggcgaatcttttaaaaaacgcctttcactatgtgattgattcctgggggttcggagtgggtgccggaaacgtctcttactatttaaaagcggagcccgtttatgatacgggcggcgtagttgaggtgcacaactggctcgtcgagattatggcgaacttcggcgttcttacgatgctcggttacctgacagtctatttgttccttttttggacactttataaatgtcatgaaagaaaatcggaaaatcagtcaagactgatcacagaaggacttatcacggcgatggccggttttttggtaagcagcatcagcccaagctccgtatcaaatttatttttccactgggtatttctctcgctcgtgatcgcggcggtcaatatattgaggcgtttacaaaaggagcctgccgtcacggcgtactatgaaaaacagggagatgcgagatgaaggatatgttgacaagaataacccggcgtatcaaaaagaatatcatttggatcattgcgctgcccgttgtgttaggggcagcgggatatgtattgccgtcaaaaatcagcgggggcagcagttttacatcagaagccgcgatcgccgcgggaaattatgatcatccgctttataacaatacaaaagaaatcccgctccttttgacgagcgatgcctttttaaagcaggctttgcctgataaaacagacgaagaaagagcggccgtgaaaagtaaactgactgtcgaaacacaatcagattcattgatcacggtcagctacagcggccaaaacaaacaggagaccgaatcggtgtttcaagccgtcataaaaacttttctgaagattgatcaggacctgtttgaaaaacgggcaaaagtagtgcggcagagtattgctgcgcttgaaggagaaaccgtcagcgcggacgccaaagtggataaggaacgatttttatacgaattgaaaaatacgcagctgaacctgaaagcggccggcatcatcaattcagagccgatgaatgaaacggcgggacaaggcatgccgccgaaaaagaaagcggttctgggcgttttaatcggcattgcagttgcatttatgttcattgtcattcctgagttttttagagagtccttgtaaaaatctgcgatggagatgtgaccatgacaaactggaaacctttcgtatctgtcattacaccgtcttataatgcaagtgaatatatcgaagacacgattcagtccgttttacatcaaagccacccgcattgggaaatgattatcgcggatgattgttcaacggacggaacgagagatattttacggcaatatgaacaaaaggatgagcggatccgcgtcgtttatttagataaaaacgggggagccgcggctgccagaaatacagcccttaaacatgccaagggccgttatgtcgcatttctggacagcgatgacagatggaaaaaggaaaagcttcaaaaacagcttgcgtttatggcagagcggtcctgcgctttttcatttacgggctacagcgtcatggagcaggacggaacgccgacggacaaaacgattcaagcccctgaaagcctgtcatatgatgaagctttaaaaaacacgattatcggatgtttaacggtcatgattgacagagagcagacggggcagattcaaatgcctgatatcagaacgcggcaggatttagcgacatggctttccctgctgaaaaggggatttacggcttacggcctgaatgagtgcctttcagaatacaggcttgtgcagaattcgatttcaagtaacaagtggaaagccgcaaaaaaaacgtggtttgtttatagagaaattgagcgcctgcattttatcaaggcttcgtggtgttttatgcaatatgcaaaaaacgcggtcttgaaaagactgtaggcgtcagaggagctgggtgatgaaggtggaaccgattattcacgtaatcgtcggagcggcggaatgggggcatgaccggctgagatacagacggcaccggctggctgaatttctcgcccggcaaaaagaaacgaaaagcgtcatttgggtatgcccgtctccgcgagccaatgatggtcagatggccgggatcgccgagggaatccggcagttcactgtaaaggatctcatgcggcaaaaagctttccgcttcggcaggtatacagacatgtgctacaggcataagctttcaccattggtgaacatgctgaaggaagaaggagaaggggcccgctgctgcttatggtacaccttccccggttttccgcttctggcagatctgtttccttgggatgaagtgatttatgattgcagtgatctgtgggccgctccgatcagcggccgatccggggtgctgtcaaatgttagaagaaacatcattaaacaggcggaaatgagaatcattcagcgtgccgattccattacgtgtacatctgactgtctgcaccgggaggtcggaaaaaagctggagaatccgcaccagaaagtgttcaccattgaaaacggagtggaatatgacctgttttcacgggaaaataaacagccggatgaagacattttacggggacggaacggaacggttctcggttttatcggcggaatcaaaccgaagctcgattttgcgcttatggcggaaacggcagatgtgaggcctgactggacgattttattggtaggcccgaacacggctcaggacgatccggatttcaagtcgcttctggagcgtccgaatgtcatctggacgggacctgccgcgccgaatgaagtgccgtcctatatgcagcttgtcgacatcggcatcatgccgtataaaaattcaccttataatgacgcggtatttccgcttaagctttttgaatttttagccgccggaaaaccagttgtcggctgcaacctttcttctacgtcaaaaatcaaaagacctttcgtctatgaatacgttgaaggcagtgaccccgcagatttcatcgcggcctgcgacgcgcttctggcagcggaccgcagcggatcatatgaggctttgcgccgtgaattggcccggagacgggattggaatgttttattcggccgaatgctcgaatgcacgggtatattgaaaaatgcgcaatcccattaaaagggaaagcgcattttttgatttgcgtgtttctttttgatgatgcttgttataataactagtaagaattataatggaaggaacggttcaatatcagaaaagacttcatataattccaaaggagacttctttatgcttgacgaacgcatgtttcgcatagttgttgcgttttttgtctctctgctaacggttttaatcctaactcctatcgtaaaaaaaattgcgatcaaaataggtgcagttgaccagcccagcaaccgaaaagtacatgataaaataatgccccgtatgggcggcctggccatctttatcggcgtagcggcgggtgttctcgcggccggcatatataatgaaacgaaaatgaccgccattacagtgggtgcgtttattattgttattttaggaatccttgatgataaataccaattaagcgcaaaggtaaagtttttcgtccagctggccgtggccattatgattgtgagcacgggactgaaaatggactttttctccgtaccgtttttaacggaacgtttagaattgggatgggtcgcttacccgctgactgtgttatggatcgtcggtattacgaacgcgatgaacctgattgacggtttggacggactcgctgccggcctgtcggtcatcggactctccactatcgccgttatggcgttatccggagggaaaatccttattctgtcactttcacttgtcgtgataggaagcacactcggatttttattttataattttcatccggcaaagatatttatgggagataccggatcgctctttctcggatacgtcatctcagtactctcattattaggtctttataaaagtgttacattattcagtatcatcattccgatcatcattttgggcgtgccgatttttgatacgacattcgccgtcatcaggcggattttaaacaaacagccgatctcagcgcctgataagtcacatatacaccaccggctgatggccttcgggctgtcacaccgcacggctgtcattatcatttatttaatcggctttattttcagcgtcagtgccatcctgctgaaaagcgcgaccatatggctttcgctgtttattatttttgtattgattgtatttatgcaaatcatagcagaggtcacagggttagtaaatgaacaatttaaaccatttaccaagttttacaagagattggtaaagaaaaattaaaaagagcagatcatgcgaatggtctgcttttttgtggattctgctattctgctattctcttattatataaaaaaacccgatcctgctcaaaggatcgggtttactcttaatagcctgttgtgccgccggactgtgtgctgtccgtaccgtttgcaccagcagtaccgttggttgaatcggttgtgccgcttgttcctgtgctgccggaagttgaatcagccgtaccgcctgttcctgtgctgtcggaagtcgaatcagtcgtactgtccgttccggtgctgtcagaagcaggatcggacgccgtgctgcttccggacgggtagtccaggtgtttctgcaattcctgccgtactttttcgagattggtcggatcgggctggaaataatacgttccgcccgtagacgcggttccgccgccgcctaaatataaatctgatcctgttatggtcagtgtatcaatctttttgctggtaaagccgttataaatctgctgaagggcgagtccttcagtgattcggatattcgtttgtacatttttgcttgctgtttcagcgattttatcgattttagcaatatttccagccttagacatttggtcgatcagtgcatttaggatttgcttttggcggtcattacggccgaagtctccgcgtttatcctgctttctcatgcgtgcgtaagccagagcctgctcaccgttcaaatgcatgtttcctttcttgaagtagatccgtttctttttactgacgtcactcatctcgtcgaagtcaaaaggcacttttacattgactccgccgacttcatcaataacatccttaaagccgttaaaatcgacagtgacatacttatcaatcggtatgcctaataagtcttcgacggttgagacggtttcatccgccccgcctttagcaaaagccgcattgatttttgattttttaccggttgtatcgccggcaagcgtcacccgcgtatcacgcggaatactcagcattttcattgttttatttctcggatcaagggtaacgacaataagagagtctgatcgtccgccttttccgcttgtggcataattttcgatccccataaacaaaatggagaacggttttttcttcatatcgatgactttatcccgaagttttgatttgtctccgcgggaaagggcatcatatgcattatctgccgcattgatcgttttgtatactttgtatccgccaaacccggcagcgactaacaaaacgagggtaagcagcagcaaaatccgtttgaatatgatctttcgtttgcttttctttttctttcgaacacgcactcttacacgttcagccattacattagtctcctttagggctgacgtctgtttctaaatacgtcagttctccctctgtattcttactcttgccgttcgtcagctctgtcatccattttataaactcgtctttgtctttttcttcaacgtacgtttcaaattcgacatgatccgcataatggatatctttcagtaaaaaaactgattctctcagttcgttctctatcttgccgagccacgtataatccgctgatgtatgcataatccgcatcagcttccgctccgtaactcctatatgatttaagccttcagacactgacttcccatatgcacgaatcaatccgcctgcaccgagctttattccgccgaaataccgggtaaccaccgcgcaggtatctttcagaccgcgttttttcagcacttccagcatggggacgccggctgtgccgcttggttctccgtcatcattcgccttttgtatatggtcggtttcgccgatcagataagctgagcagttatgagtcgcattccagtgctgtttttttatcttttgtataaattcctgcgcttcctcttcagaagcagcacggctcaggtgacagataaaacgcgatttttcaatcacaatctcatgttcacccgtttctttaactgttaaatagctgtgcagcatgattgctggaccctcctgacaagcattaaaagacttgtttctacaaattcgaacagactttagaatttttgcgcatattttggtatcatgaaagagtaagatactatataaaaatgtttttttctagaatatacgcattctttcattataattcgacataaattgcagttcaattacatttataataaaaatacataacaacaccgttacggagggagacagatgaataaatcgaagatggactccaaagttttggattctatacttatgaaaatgctgaaaaccgtggacgggagcaaggacgaggtttttcaaatcggagagcagtcgcgccagcaatatgagcagctggttgaagaactcaaacagatcaaacagcaggtctacgaagtcattgagctgggcgacaaacttgaagttcatacgcggcacgcacgaaaccgcttgtctgaagtaagcagaaatttccataagttcagcgaagaagaaattcgcaacgcctatgaaaaggcgcacaaacttcaagtggaactgacgatgatccaacagcgtgaaaagcagctgcgggagcgcagagatgatttagaacgccggcttttggggcttcaggaaatcattgaacggtcagaatctttggtcagccaaataaccgtcgttctgaattacctgaatcaagaccttcgccaagtagggcttcttcttgccgatgcgcaggctaaacaagatttcggtttaagaatcattgaagcccaagaggaagaaagaaaaagagtttccagagaaattcatgacggtcccgcgcaaatgctggcaaatgtcatgatgagatcggaattaattgaacggatcttccgcgaccgcggcacggaggacggatttcaggaaatcagaaatctgcggcagaatgtgcggaatgccctttacgaagtcagaaggattatatatgatttaagaccgatggcattggacgatctcgggctgattccgacactgagaaaatatctttatacaactgaagaatacaacggaaaggtgaaaatacattttcagtgtatcggagacacagagaaccaaaggcttgccccgcaatttgaagtggcgcttttccgtctcgctcaggaagccgtcacaaatgcactcaagcattcagaatcagaggaaattacagtaaaagtggaagtaaccgctgattttgtcgttctcatcattaaggacaacggaaaaggctttgatattaaggatgctaaacaaaagaaaaacaaatcattcggcttgctgggaatgaaagaaagagtagatctgcttgaaggaacgataacgatagactctaaaataggtcttgggacatttatcatgattaaggttccgttatctctcggcctataatttgttaaatagagccaaaagacatattgaccgaacagcggcgtatatagaacaataggataaggaggcgtagcgtgtgactaaagtaaatattgttattatcgacgaccatcaactattccgtgagggtgtaaaaagaatattggattttgaacctacctttgaagtggtagcagaaggtgacgatggagatgaggcggctcgaatcgtcgagcattatcatcccgatgttgtcataatggacatcaatatgccgaatgtaaatggagtagaggctactaaacagcttgttgagctgtaccctgaatctaaggtgattatcctctccatccatgatgatgaaaactatgtgactcatgctttaaaaacaggtgcaagaggctatctcctgaaagagatggacgcagatactttaatcgaagcagtgaaagtggtagccgagggcggttcttaccttcacccgaaagtaacccacaatcttgtcaacgaattccgccgtcttgcgacaagtggagtttctgctcatcctcagcatgaggtttacccggaaatccggagaccattacatatattaacgagacgggaatgtgaagtgctgcaaatgcttgcagacggaaaaagcaaccgcggaatcggtgaatcattgtttatcagtgagaaaacagtgaaaaaccacgtgagtaatattttgcagaaaatgaacgttaatgaccggacacaagccgttgtcgtggccattaaaaacggctgggtagagatgcgttagccatgtgtgagaagacttgcctgttatggcaagtctttttttacagctgcatatctattaaaatacttattaagtacttaataaggcaggtaaagtgatgaagattgcagttgtaacagacagtacagcatatattccgaaagagatgagagaagaacatcatattcatatgatccctctccaagtggttttcggtgaaaaaacattccgcgaagaaacagaactcgactggagaagtttttataaagaagtaaaaaatcatgatgagctgccgactacgtctcagccttctttcggtgaattaatcgcattgtacgaagaactgggcaaaacatatgatgcagtcataagcatacatttgtccagcggaatcagcggaacatataacagcgccgcctcggcaaacactatggttgatcatattaaagtttatccctttgattcagagatcagctgtttggcacaagggttttatgcgttaaaggcagcacagctcattaaagacggtgttgactcaccggaagagattataaaagagctggaagaaatgaaaaaaacagtccgtgcgtattttatggtggacgatttatcacacctccagcggggcgggcgtctaagcagtgctcaggcttttatcggcggtctgttaaaggtaaagcctattcttcattttgacaataaggtaattgttccttttgagaagattcggacacgcaaaaaagcgatttcgagaatttttgagctgtttggggaggatgcaagtaaaggaatcccgatgcgggccgctgtcatccatgcaaacagggaagaagaagcggcggctattatacaggagttaagcggtaaatatcctcatgtcgaattctataacagctatttcggtgccgtgatcggaacccatttgggcgaaggcgccatcggaatcggctggtgctttaaaaactaagtgaaaatctccgttttcaagggcggagatttttttattttttaattttcgcaattcgacaagtgggttcccgacaaggcatactttgagcagaaaggaggcagggagatgtccgaaggtgcttcagaattttcagaggtgcgggatttcttttacggccggcatttattgagatctgagataccgttttcagaccagcgcattaagcgttttacagaaaaagaatatataacggccgagccgtcaatcatccgccggaaaaatcgttacgtctgccaacgatgcggtcagtctgatcaagcctgctttgcggcattttgggcgccctctgccaaaaggcagattacctattgccgtgcctgtgtcatgatgggaagggctgatgaactgacatcattatattcttggaatcaaacccctgaaaacagctgggagcctgtaaagctttcttgggaaggaacactgacagacggacagaagcgggcggccgccgcgcttacagatgcgataaaagagagacaagagctgttagtatgggcggtttgcggatcggggaaaacagagatgctgtttccgggtatcgagtttgcgctgaatcacggtttgcgcgtctgtgtcgcgactccgcgtacagatgtcgtacttgaactgctgccgagactgaaaaaagcatttgagaaagtcgaagtttctgcttggtacggcggcagcgaggacaaaggccgtctgactccgttaatgatttcaaccgctcaccagctgatgcgctaccgagacatttttgatgtcatgataatagatgaagtagatgcgtttcctttttcagccgatgagacattaagattcgctgttgataaagcgaggaagaaaaacagcgcccttgtttatgtaacggcaactccttcagacacattaaaaaagaaggctgaagccggtttgctgaaaagcgtccgcataccggccagatatcatcggaaacccctcccggagccgcgttttttgtggtgcggcaattggaagaagaagcttcagaaaggaaaactgccgcgctctgtaacggattgggtccgccaaaaacttcaatcacagctgccggttttcttattcgttccgtctgtacatgtattgaaaaagacaacggattattttcagaaattaaacatacgggcagaaggcgtacatgcggaagacacattcagaaaggataaagtgaaacggttcagaaacggccggcttgacctgctggtaacgactacgattttagaaagaggggttaccgtgcccaaagttcagacatgtgtcctcggcgcagaagcacctatctttactgagagcgcgctcgtacagatcgcaggcagaacgggaaggcattataaacatttcagcggtgatgtcgtcatgtttcatttcggaatgacaaacggaatgaaaaaagcaaaaaaacatatagaacatatgaacaaattggcacaaaaaagtaaattgttggactagttaatttcagaaaacatgatacagtatactcatactttcctatgaggagctgtcagcatgcttgtcaattcaaaagaaatcgtattaaaggaacttctcgaccgccatatgtctcagcttcatatgaaatgcacatgccgggtatgcaaaaatgatgtactggcactttcacttaaccgggctgaaccggcatatgttacagataaaaagaaagttgcttatgcaaaagcagagatagttgataaacagaaaaatacggcgctgcttgtcattctggctgaatcagcggcgattgtttcggttaatccaagcgagttctgtgaaactcgggaaggagcgtaatatctctgaattgtttattgtgtgactcaccaatttcaagttcattgacttggagatctctattttctctggcgcccgagcaagaggtatgcagcatatgcagcagccaattcgaaaaaattgaaggccccgtatgcagtatatgcgggaggcctcaggagtcaaatgaaaaatgcgctgattgtgcggcccgggaatcaaaaacggaaaagcgctttttgctgcggcaaaaccgttcggtatatttatataatgatgcgatgaaggactcattggcccgttttaaattcaggggtgatgcaaaaatcattcaagcatttgaacgtgactttgctgccggctttaaagcggcatatccatcaaatacacatactctcatccctattccgctgagcggcgaacggctggcggaacgcggattcaatcaatccgagctgctggcctctctgctcggaatgcctgtcatttcccccctcatccgactgaacaacgaaaaacaatccaaaaagagcaaaacagataggctgtctgcagaaaaaaagttttcagcagccgaaaactccgccgaaggtatgaacgtcattttaatagatgatatttatacgacgggcgccacacttcaccaagccgccgaagtcctgctgacagcgggcaaagcgtcatcggtctcctcttttactttaatcaggagctaaatcattctttttttctgccgatataattgatagaaatataaggcagattaaagaaggaataggagttaataagatgggtgaattggcgaattgtccaaaatgcaatgctttattttttaaaacgaacctgcagaccgtgtgccaggcatgtattaaagaagaagaaaaagcatttgaaaccgtctataaatttttgagaaagcagatcaacagacagtcgacgatgcagcagatcactgaggaaacaggtgtggatgaagagctgatcctcaagtttatcaaacaaaaaaggattcagatcagccagcttccgaatttggcatatccttgcgaaaggtgcggaaatccaatcaggacggggaaattttgcaagtcctgtcagacagatattgagtcgcaattagaccatatgaaccaaaaaacagccgctgaattcgaagataaaaacagtacaaaagacacatactatgcctataataccaaaaacacctgattccctaaactaactgataacgcagtcgataaaagaattagactgcgaacagaaagcgagaggaatcctatgaaaatcaatcagtacggaacacaatccgttaatccataccaaaaaaattacgaaaagcaagccgtacaaaaagaggctgcaaagccgaaggacaaagtggaaatttcttctcatgcaaaagagcttcaaaatgcgtcagatgcggtcactaaaacacgacaggaaaaaatcgctcagcttaaagcggatatagagagcggaacatataaaatagattcaaacagcatcgctgaaaatatagtaaatttctataaaaagcaataaaaaggagaaagccaatgtcagcaaagccaattattgatcaactgaagcgactttgcgcactgcatgaacatctgctcacgctgtctgaggagaaaacggaagcgctgaaagcaggtaaaacaaaagagctctccaacatattgaccaaagagcaaaagtatattcaggcaatcgggcagactgaggaagaacgaatcaggttaacttctcagtttctcagccgcggtgaggacaatacaattgctgcatgcatctccagaacttcaggcagtgaaaaacaggagcttgaagggttatttcactctttgtctgcgcttcttgaccgtctgaaagaagtgaatgagatgaacaaacagctcacgattcaggctttacaattcatctccggggcattcgatatgatcatgccgggtgaaaaagagaatatgaattataaagagccgcaagcggcgcgcaagcctgtcagccgtttgacattattcgattcaaaagcttagaacggaggattttcaatgccatcgacttttatggggctggaaacagcaaggcgtgcattgagtgcgcagcagactgcattgagcacagtttcaaataacgttgcaaatgcaaatacagaaggatacacgaggcaacgcgtcacattacaatcgacgagcccttatcccgcagtatcaaaaaacagtgatctgacggccggccaaatcggaacaggagtaaaagccggttcagttgagcgcgtcagagacagttttttagactatcagtacagaactgaaaatacaaaattagggtactatacagcccgttccaattcattgtcgcaaatggaaggcgtcatgaaagagcttgacgataacggattaaacggatcgctcagttcgttttggaatgcccttcaggatctggcgacgaatccggaaaatacgggagcgcgctcagttttgcaggagcaggggaaatctcttgccgaaagttttaactatatatctacctctttgactaacattcagggtgatattaaaaagaacctggataacacagcggatcaggtcaattccgttctcaatcagctgaatgaccttaacaatcaaatagcggcagttgagccgagcggtatgctccctaatgatttgtatgaccaaagagacagattgattgatcaattatcttctatggcaaacattaaagtttcatataataagtcgggcggacatgccttggcgactgctgagggcacggttaacgtcgaattgctgaacggaaacaacaattctctcggtacgctgctcgacggtaacacaaaaacagtttcagaaatgaaaatcaactacgataaggacagcggcctcgtgtcgagtgtgtcagtcggcagcaatacggtcaatgcggatgcatttaccggaaaaggctcactcttaggtcttattgaatcatacggctatatgtcaaatggagaagaaaaaggtctttatcctgaaatgctgacggctcttgacaatatggcgctgtcctttgctgacgcgtttaatgcagttcatgaaaaagggaagacctatacaggcgaacagggtgcagcattttttgatttcagcggtggtgaagcggtgccggcaaaaggtgcggcagcgaaaataaaagtcagtgacaaaatccttgcgtctactgataatatcgcagcgtcgttaaacggagaaaaaagtgacggcacaaacgcgacaaatcttgcagccgtacagaacagcaagctgactattaacggtgaaaccactacaattaatgacttttatgaatcccttatcggaaagctgggcgttaattcacaaaaagcggccaatcttatgaacaactctgaaagcaacaccctttcagccgatgaacggagacaatctgtcagtgcagtgtctttagatgaagaaatgacaaatatgattcagtttcagcacgcttataatgcggctgcgcggatcataacgatgcaggatgaaatattcgataaaattattaacggtatgggcaccggaggaagataggagataagtaaatgagagtaactcaagggatgatcgcaaaaaattctcttcgatttatcggctcaagttatgacaagctcgatcggcttcagcagcaagtgtctacggggaaaaaaatcacgaaagcttctgatgatccggtcgttgcaatgaagggaatgcagtaccgtactcagcttgcgcaggtaaaccagtatcagcggaatgtttcgcaaggctttacatggctggaaaactcggaatcaagcgtaaactcggaaacggatattatgggaaaaatccgggacttgatggttcaggcgaaaagtgattcgaatggtgaaacagaattgaaagcaatcggtacagaaatcggccagctgaaaaagcagctcgtttctgtcgcgaatactcaggtaaacggacgttatctgtttaacggaacaaattcagacgtcccgccgatcactgaaaatgccgacggcacatatacgtacaactatgagaattatacaggtgcttcggatgttaacatcaacatctcgaacggagcagtgttgaaagtgaattctgatccgaactcagctttcggaggcgtcgcacaaaatggagataatgtttttgaatttcttaactccttagaagcttctttaagcaaaggcacgctgtccgaagcagattcagatcaaattctgtcagatattgacggttttactgataaaatgaatgctgaaaaatccaatatcggcgcacgcacaaaccggttggaactcattcagacaagattggaatcacaagcggcaaccgctgaaaaagtattgtccgataatgaagatgtagaaatggaagatgtaattgttgattatttatctcaacagacggttcatagagcagcgctgtcagtgaatgcgaacatcattcagccgtcactgattgacttcctgaaataatataactgatcgtcttcaatatataaaaaaagcgactcacaacagggagatcgctttttttactaaaatactataaacaggagggatctctgtgcagatgccgagattgattattgacagtgtgcctgctaaaatcggtataacctttcaaaaggaagaaatcgagatggaacagccgcccgctgacttggaaatcgagcagccgccggcagagctgaacattgaaagcacgccggccaaactgacgattgaccagacgagggcgtgggagaacttgaatctcaaatcatttgaaaagctgaacgctgaagccgcccagaaaggtgcggaagcctgcagcgagtttatcgcaaaaacagtcagggaagggaaggaaatggcggctatcgaaaagaaaacgggcaatgtgatggcccggcaggcagcagatgtcagaccgcccgatccattcggcgaattcagcgactttctgcctgcgcagtttctcgtcgacattgactgcattccttcaaagcttacgattgatattgaagcccgcaaaccttcaattgaagcagccgtcaataaacctgtatggaattatacgccggggaaagttcagattgatatgatgcaagaccctaaggtgacgatttcggttgacgatggcaacgcagaataaaagatgaaagtggtaaaggattgtgaagcatgataattaaaacaaaatatcacggagaaatcagaatagacgaagggcagattatctcatttgaaaacggcctgccgggatttaatgacgagactcaatttgttgttcttcctttgtcggaagattcaccgtttttggcgctgcagtctgtcaaacaggagcacatcgcctttattgtcgccagtccgtttattttctttaaagggtacgaatttgacattgaccatgcgacgcttgaacttttgcatattgaagatatagaggacgtcgaagtgatggcgattttaacgctggaagagccttttgaaaacacgaccgccaatttaaaagcgccgattatcgtcaataaaaaggaaatgaaggcgaaacaaatcattttacatgatgcttcctatgaaacaaaacatctgataggaggaggatcatgctagttctctcaagaaaagtgaatgagtccattcagatcgggccggatattgaaataaaggtgatcgccatcgaaggagaacaagtgaagctgggaattgaagcgcctcagcacgtagatattcacaggaaagaaatctacttgtcgatcctggaagagaacaacagagctgtatcttttaatactgatttattacttaacctatcctcacaaaaaaagtgaggatttttttattttcaatataaacaatagaaacggccatccgatatatatagtgtagccaatgagaggaaaaattttcttcagaatgacgctgcgcaaatgcacaaggacgtgcgaaaaacaattcagggaggaaatacaaaatgagaatcaaccacaatatcgcggctcttaacacaagccgtcagctgaatgcaggttcaaacgctgcttctaaaaacatggaaaaattatcttcaggtcttcgcatcaaccgcgctggtgatgacgctgcgggtcttgcgatctctgaaaaaatgcgttctcaaatccgcggtttagacatggcgtctaaaaacgctcaagacggaatctctcttatccaaacatctgagggtgcattgaacgaaactcacagcattcttcagcgtatgagcgagcttgctacacaagcggcgaacgatacaaacactgattctgaccgttctgagcttcaaaaagagatggaccaattagcgtctgaagtaacaagaatctctactgacactgagttcaacacgaagaaacttcttgacggaactgcgcaaaaccttacgttccaaatcggagctaacgaaggccaaacaatgagcctgtctatcaataaaatggactctgaaagcctgaaagttggtacgacttacacagcaaatgatgacggttctaagcttgtaactgcagatggaaaagaagcaacccttgtcactgacggttctaaagggccgaatggctactatgatgatgctgataaattagtttatcaagctgacagtgcattagctaaagatacaaaagtaacaaaaggtatcgacatctcatcttcagctaaagctgcgtcttcagctcttacaacaatcaaaacagctatcgacacagtttcaagcgagcgcgctaaacttggtgcggttcaaaaccgtttagagcacacaatcaacaaccttggtacttcttctgagaacctgacttctgctgaatcacgtatccgtgacgtagacatggcttctgagatgatggagtacacgaaaaacaacatccttactcaggcttctcaagctatgcttgcgcaagctaaccaacagcctcagcaagttcttcaattgctcaaaggttaatgacggaaagatcctggttctccagggtcttttttttatttcttcagctatctcccccttcagcaagccaaagaaccctattgacaaaatgaaacattatattttgcagttaaattattgaaaaccttttaatatgaccgatataagaataagatcatacatttatggagctgtgatatgataaacagtcggaaactcactgttgtcatagagccgtctacgactaaacgctgaaaaggagagggtacatatggtcacaagaatcacaggccttaattccggtcttgatgtagattctctggtgaaaaaactaatggatgccgaaaagcagccgcttaataaattaaaccagcaaaagcagacgcttgaatggaagcgcgatgcttatcgggaagtgaatacccagattgccgacatgtattctacgacatttaataatatgctgatgtccacaaactggaataaaaaaacagtaacaagttcggattccagtgtcagcgcggtggctgtcagtgctgaacagaatatttcaacgagcatgtctgtacagcagctggccacaccgacgacttataaatcatcaggggccatcaatttcacttcaggtcagagccaaacattgaaattcaatgtcacaaatccgggtgaaacgaagccgactgaggtaaacgtcacgatcgccgcaaccgatacgattgacgatgtcatttccaaactgaacagctcaggccttggggtgacggctttaaaagagaaaatttccaacggcacggattatgtggatacgattgcgttcacttccaataaaacgggggaaggatttaccctttcagcaggtgatgacgcaaccaaaagctttctgaaagatcagctcggttttgccgttgatgatgcaacaaatgaactgacggccaatgccgaagggaaaaacgcgaagtttacgttcaacgggcttgaaatgacaaaaacgtccaataactttacgatcaacggcatcaaatacacgctgaacagcgtgacggacagcaataaaacggttacgattaacagcacgactgatacggacggcatttttgacaacattaaagatttcgttgataaatacaatacgttaattaaaagtgtaaacgagaaggcgtcggaatcaaaataccgtgattataagccgctaaccgatgaacaaagagaagcgatgaccgataagcagattgagcagtgggaagcaaaggccaaaagcggtttattacggagcgacagcacgctgcagaacggtttggcggagatgcggcttgatctgtactcaacggttacgattgacgggaaaaaatatcagcttgcagatttcggaattgagacgtctgatagttatacggatcaaggaaagcttgtcattaaagacgaagcgaaactgaaacagaaaattaccgagaatcctgctctcgtggctaaactgtttaatgcagacagccctgatacagcgaaaaccaaaaacccggaggaacaggggattgcccggagattaaaagacacattaaacaaaatgcagattcaaatttcaaaacaggcgggtacggaaagctcggtatcaaccagctttgccatcggaaaaagcctggatgaaatagaaacaaatatttccaatatgaaaacgaagctggatgacatcgagacgagatattataaaaagttcagcgcactggatacggcattggagaaattgaacagccaatcttcatatctcacgtcaatgttaggatcttcaacatcataaccttggaggttttataaaaatggcaataaataatccttttgctgcttatcagcagacatccgtctttacagccgctccggaagagctgacccttatgctttataacggctgcctgcgattcattaagctggccaggcaggcgatgaagcaaaacaaccttgaagccaaaaatgaaaatatcgtaaaggcgcaaaacatcattcaagagctcagcatcacgttaaaccgggagattgagatttctgaacagatgtcatccatttatgattacatccgccgccggctgatcgacgcgaacgtgcagaataacggagaatttttagatgaagcggaaaaactcgttactgaatttcgcgacacgtggaagcaggccatgcagagtgaacggaaaaacagccacggcgcgggcggccttgcctgatgaacagcaatgtcttttctttgtataacgaaacgaagaacatgtacgccgcactgaaggacgccccggaaagcgacggtcttatcagcagcgttacggcatttacggagaaaagggaggagatgcttgcgggcataaagccgcctttttccgaagaagaaaaaacgctgcttcagcaggtggccgcgatggaccgtctgattaccggcgaagtgaaacggattcaggatggtatccgaaatgaaataaaaacgcttaagaaaaaacgaatctaccataatacgtatttcaatccgtatcatcaaacgacaagtgacggccgtttttacgacaaacgcaaataggtgagtgttttgagaagtttgaacgattaccatttggtgtcagcctactaccagcttctttttacgattgatgaggggctttgctacctgttggacacgcaggatgatttttttaagacggagggcgagcggatttacaacgatttgattcaggctttttttcatctcgattcctctcatgcgcttctgctgtctatcattgagtgccgatgcgtggagacggcgatccgctcatttgacgagatctttcaggatttcagcatgttaaatgattatgatttcccgtccgccccttttcaggagtttttaaaaaccatctttctgccgcattataagctatggatggagcagacgcacgactgcatcaaaccgtatgttcttcactagacctgctgcaagcggcaggtcttttgcctgcgtcctccgcatatacttataatcctggcggaagctgccggataaaaccgacaccattcgtcatcgttcaccgaatttacacattattttaacgtttcagcagggatcagaaggggtaaaagagaaatagttacatatccttagataaagggaggcgttctttgatgaactacaatatcagaggagaaaacattgaggttacacctgcgttaaaggatcatgtggagagaaaaatcggcaagctggagcgatatttcgagcagagcgtcaatgccgatgtgaacgtcaacttaaaattctataatgataaggaatctaaagttgaagtcaccattccgatgactgatctggcgcttcgttctgaagtgcataacgaggatatgtacaatgcaattgatctcgcaacaaacaagctggaacgtcaaatccgaaagcacaaaacaaaagtcaaccgaaaattccgcgagcagggtcttccgaaacattatttcgagaacggcagcgctgctgatacgggcgtagcggttcaggacgaaattgaagatgacagcccggaaattgtccgtcaaaagcgttttaatttaaaaccgatggataatgaagaagcgattctccaaatgaatatgctcggacataatttcttcgtattcaccaacgcggagacgaatctcacaaacgtcgtttaccgcagaaatgacggcaaatacggattaattgaaccgactgaataaacccatccagccttccgtgaacgcgcggaaggtttttctctatctttatctgcaaattctttggaaatagcaaaaggtatgttatgataatgagaggtatacatggacagaaaattatcatttattccatgcaaaatctgcatgtgaacatagaggagcgttatagatgcttgggattttaaataaaatgtttgatccgaccaaacgtgcgctgaacaaatacgaaaaaatagcaaatgacattgatgccgtaagaggagattatgaaaatctctctgacgaggcgcttaaacataaaacggcagaatttaaagagcggcttgaaaaaggagaaacgacggatgaccttcttgtcgaagcgtttgccgtcgttcgtgaagcttcccgccgcgtaaccggcatgttcccgtttaaagtgcagctgatggggggcatcgcccttcatgaggggaacatttccgaaatgaaaacaggggaagggaaaacgctgacgtccacgcttcccgtgtatttaaatgcgttgacgggaaaaggcgttcacgtcgtaacggtcaacgaatatctggcgagccgtgatgcccagcaaatgggagagatttttgcgtttctcgggcttacagtcggcctgaacctgaattcgatgtcaaaagacgaaaaacgcgaagcttacgcagccgatatcacgtattcaacgaacaatgaactcggctttgattatttgcgtgacaacatggtgctctataaagaacaaatggtgcagcgcccgcttcattttgccgttattgatgaagtcgattcaattttagtcgatgaagcgagaacgccattgattatttccggacaagctcagaagtccacaaaactgtacgtgcaggcaaatgcgtttgtccgcacactcaagaaagatcaggattatacgtatgacgtcaaaacgaagggcgttcagctgacggaagaaggaatgacgaaggctgaaaaaacgttcggcatcgacaacctgtttgatgtcaaaaacgtggccttgaaccaccatatcaaccaggctttaaaagcccatgcggcgatgcagaaagacgtggattatgttgttgaggacggccaggtcgtcatcgttgattccttcaccggccgtctgatgaaaggacgccgctacagcgaaggtcttcaccaggcaattgaggcgaaagaaggcctggagattcaaaatgaaagcatgacattggcgacgattacgttccaaaactatttccgtatgtacgaaaagctggccggtatgaccggtaccgcaaaaacggaagaggaagaattccgcaatatttataacatgcaggttgtatccatcccgaccaaccagccggtcatccgtgacgaccgtccggacttgatctaccgctcaatggaagggaaattcaaggcggtggcggaggatgtcgcccagcgctacatgaccggacagccggttcttgtcggtacggttgccgttgaaacgtctgaattgatttctaaacttctgaaaaacaaagggattccgcatcaggtgctgaatgccaaaaaccatgagcgcgaagctcagattattgaggaagcgggacaaaaaggcgctgtcacgattgcgaccaacatggcgggacgcggaaccgacattaaactcggcgaaggcgtaaaagagcttggcggccttgcagtcgtcggtacggaacgccacgaatcccgtcggattgacaatcagctccgcggacgttcaggacgtcagggagacccgggcatcacacaattttatctttcaatggaagatgaattgatgcgccgtttcggagctgaacggacgatggcgatgcttgaccggttcggtatggatgactccacgccgattcagagcaaaatggtgtcacgcgccgtggaatcatctcaaaaacgtgtcgaaggaaacaacttcgattcacgtaaacagcttcttcaatatgacgacgtgctccgtcagcagcgcgaagtcatttacaagcagcgttttgaagtcattgactctgaaaacctgcgtgacattgtggaaggcatgatcaagtcttcactggagcgtgcaattgccgcttatacgccgaaagaggagcttccggaagaatggaatcttgacggcctcgtggagcttgtgaatacaacgtatcttgatgaaggcgcgcttgaaaagagtgatatcttcggaaaagaaccggatgaaatgcatgagatgatcatggatcgcatcatgacaaaatataatgaaaaagaagagaatttcggcacagagcagatgcgtgaattcgaaaaagtcatcgtattgcgtgccgtcgattcaaaatggatggatcatattgatgcgatggatcagctgcgtcaagggattcaccttcgcgcctatgcgcagacaaatccgctgcgtgaataccaaatggaaggtttcgctatgtttgagcacatgattgagtccattgaggacgaggttgcgaaattcgtcatgaaggccgagattgaaagcaatctggaacgcgaagaagttgttcagggccaaacgacggctcatcagcctcaggacggcgatgaggccaaacaagcgaaaaaagcgccggtccgcaaagttgtggatatcggacgtaacgcgccttgccattgcggaagcggaaaaaaatataaaaattgctgcggccggacagaatagtctcgactgtatgaagcgaacatgaccgggtctgcgtcttatggcgccccggatcttttaatgaggtgaatggaatggaattatcagaaatcagggcagagctcgaaaatatggcttctcgtttagcggacttcagggggtctctttgacctcgaatcaaaggaagcccgcattgcagaattagatgaaaagatggcggaaccggaattctggaatgaccagcagaaggcccaaaccgtcatcaatgaagcgaacggtctgaaagaatacgtgaactcctatcatcagctgagcgagtctcacgaagagctgcaaatgacacatgatcttttaaaagaagaacctgaccaggaccttcagcaagagcttgaaaaagagctgaagtcattaacgaaggaattgaatgaatttgagcttcagctgctgctcagtgaaccatatgacaaaaacaacgcgattttagaacttcatccgggggccggcggtacggaatctcaggattggggttccatgctgctcagaatgtatacccgctgggcggaaagacgcggtttcaaagttgaaacgcttgattatctcccgggagatgaagcaggtattaagtctgtcacactgctcattaaaggccacaatgcatatggctatttaaaagcggaaaaaggcgtacaccgcctcgtgcggatttctccatttgattcatcaggccgccgccacacgtcattcgtgtcatgtgaagtcatgcctgaattcaatgaagaaatcgacattgatattcgtaccgaagatattaaagttgatacgtaccgggcgagcggtgccggcggacagcacgtcaatacgactgattcagccgttcggatcacccacctgccgacaaatgtagtcgtcacgtgccagacggaacgttcacaaatcaaaaaccgcgaccgggcgatgaaaatgctcaaagcgaagctgtatcagcgcagaattgaagaacagcaggcggagcttgacgaaatccgcggcgaacagaaagaaatcggctggggcagccaaatccgctcgtacgtcttccatccgtactccatggtgaaagatcaccgcaccaatacggaaatggggaacgtgcaggcggttatggacggagatatcgatattttcattgacgcctatttacgttctaaactgtcgtaatccgggaacacacctgcctttggcaaggtgtgtttttttatccgttctctttttccatttttcacaacagcgctttagcaaattaatacggtatttggctgttatttacttctaagccgggaagacttaaaatgctatcgagagaaaatcggagaacggaggattttgcatggatgtgaatcacaataagccgctccgtctgatcaaagattatatatacatcatgatcggcgcggcgattacggggatcgtgtttaacgtatttttgctgccgaaccgtatagcagcggggggagtaagcgggatcagcaccattttagaaacgtttggttttgaaccggcttacgtgcagtggattattaacatccctttgtttatcgccggagtgatcattctcggcgggaagttcggaatgaagacactggtcggttccatcgttctgccgctcgccgtctatttaacaagagatctgcctgccgcgacgacccatgaactgctggcggcgattttcggaggcgtcgggatcggaacgggaatcggcatcgtgtatctcggcaaaggctccacggggggaacggctctggcgggccagatcattcacaaatacacggggctgtcgctgggaacgtgcctcgccatcatggacggattaattgtgctgagcgcgatgctcgttttcggagtggagcagggactgtatgcgatgctcggggtatttatttcaagcaaaacgattgatgtcgtgcaggtcgggttcaaccgctccaaaatggctttaatcattacgcagcatgaagaagccgtcagatcggctgtgtttaaagaaatcgacaggggtgtgacgaagatttccgcagtcggcgggtatacggaacatgaccgtccgatcttaatgtgtgtcgttggccagaccgaattcacaaaactgaaacaaatcgtcaaacagattgatgagtcagcctttgtcattgtcgcagacgcaagcgaggtgctcggcgagggtttcaaacgcgcgtaaacggggttataatagcgaaggggtgcatcttacatatgaaatcaaaatgggcgctgctggcgctggttctgaccatgtccgtcctgctggcggcatgcggcggttccaatgaatcgaaaaaagaaagctctgacagttcaggcgggtcaaaagcatctgcgtcagcaggagaagagctttatcagcaaagctgtatcggctgccacggaaaagacttagaaggcggcggaggtccgaatttacaggaagtcggcgggaagtatgatgaagctaaaattgaaagcatcattaaaaacggacgcggcaatatgccgagccatcttgtaaatgataaggaagccgctgagatcgcaaaatggctgtcacagaaaaaataacagaaaaaccttgcctgttataggggcaaggttttttcacggtctgggaatgaaaagaaactgtaatagtaatatgtctaaatttgacgtataatgaagtgtactgaggaaaaggaactttcagatttttcatctgtttcctggtaaaccggccataaaccgcagtatttttacgaactctatggctgcaagacataattaaaagattaggtgatttcatgatagagatgaaagaagtatataaatcctatccgaacggtgtaaaagcgattaacgggctgtcagtcatgattcatcccggagaatttgtatatgtcgtgggaccgagcggagccggtaaatctacttttattaaaatgatttacagagaagaaaagccgacaaaaggacaaatattgattaatcataaagatctcgcgtctgtaaaagaaaaagagattcctttcgtgcggcgtaaaataggtgttgttttccaagattttaaacttcttccgaaactgacggtatttgaaaacgtcgcgttcgcgcttgaggtgatcggagagcagcagtccgttattaaaaaacgcgtgctcgaagtgctcgatcttgtgcagctgaagcataaagcgcggcagtttcccgaccagctttccggaggagaacagcagcgtgtttccatcgcaagatccatcgtcaacaatcctgacgtcgtgatagctgacgaaccgacgggcaaccttgatccggtaacatcatgggaagtcatgaagacgctggaagagattaataaccgcggaacgaccgtcgtgatggcgacacacaataaagaaatagtaaacaccatgaagaaacgggtcatcgcgatcgaagacggaattattgtgcgtgatgagtcaagaggggagtatggttcttatgattaaaattctcgggcgccatttgcgtgagagttttaaatctctcggaagaaacacatggatgacatttgcatccatcagtgccgttaccgttacattgattttggtcggcgtgtttttagtcattatgctgaatttaaacaacatggctaaaaatgctgaaaaagaagtggaaattaaagtattaatcgatctgacgtccaataagaaaacgcaggatacgctgcagaatgagattaaagacatctcgggaatccaaagcgtagagttttcatctaaagataaagagcttgatcaattggtcaaaagcttcggcgacagcggaaaggccatgaaaatgcaagatcaggaaaacccgctgaacaacgcgtttatcgtcaaaacgacagatccgcatgatacgccgaaagtcgcgaaaaaaattgagaagctggatcatgtgtataaagtgacatacgggaaagaagaagtcagccgtctgtttaagatcgtcggggtgtcacgcaacatcgggattgcgttaatcatcggccttctgttcacggcgatgttcttaatttcaaatacgattaaaatcacgattttcgccagaagaaaagagattgaaatcatgaagcttgtcggcgcgacaaactggtttatccgctggccgttcttcctggaagggctgctgctgggggtattcggttctatcataccgatcgctctcgtgctgagtacgtaccagtcgatggtcgcttgggtggccccgaaagttcagggatcatttgtttcacttctgccgtacagtccgtttgtgttccaagtatcacttgtgctcattctgatcggcgcggttatcggagtatggggaagtctgacttccatccggaaattccttcgtgtataaatacaaaagccagtctgatatagactggctttttttaatggtttcgttactgaatgacgggaagggccggtgatccgggctttaatgtaaagtcataagacgattcgtcacggtacagcgggtccgcataaatggaatccgaatcgtttgccgttcctttttggtacgctgtgaatgaatcatattctctgttcttccaattccaaatgccgtcttttccggcttctttgtgatagacgttatgattaacggtattgccttcgttttttgtataatcatttgcgataaaaatccgtgaaccgcttgccgtcatgatgtttttttcgatcgtgttcccttttgtgccgtactgcagcagcagctggccgccgtcaaggtccttcgtgtcatttcgatacataatgttatgagcgatcaccgaattgatggtgccgccgcgtttcgtgtcatagcctccgattgaaataccggtgtaagcattgccgtacaccttgttatccgtaatccggatatctcgtgcgtatttccctctatgttcggaagtggcttcaatgccgaggtcattgttgtaaacggtgttcttcttaatgtccacatgttctgcgccgtcaacgtaaataccgcccgctgaatattcatctccgtaagcgggatttccgtaagaagagttatggctcaccgtattgttttcaatgacgccgtttcgcgcatagtcgttttgcttggacgttccttcgtatccgatcacgtcaatcccgatattgttattgtcccgaatggtattgccggcaatcttaaatccgtcaacattcccgttcagcacgaccgcttcgcttgcgccgagcgtcagtttttcaaccgtattatttgtgatgctgacatccttcatggcgtctgtgccgtaaaacgcgatgccgtgtgcatttccctcatcagccgtggttttaatgtttcggatatggttgccgtcaatgttgatatgactgcttgatccggtgacgcaaattcccatggcagtcgcatcttctgatgatacggagaggttctcaagcgtaacgccgtgaatggtaatgtactgtttattgcggatttgaattaacggagtttcagaatcgctttttggcgcagatttgccgctgattgagacatgctcattctgatagttccgaaatgtaatcggcttttcggccgtgccgctgtgctttacttcaaacgtttcatcgtacgtcccttcccgaatcaatacggttgttccggcctctgccttttcagccgcatgttttaatgtgcggaacggcttttctttcgttccttcattttggtcgctgcctgcgggagaaacatacaaggcgtccgtctgcgttttttcattggcctctgtttttggccagacaaaggcggtaatgcctgcggccagaaccgccgcggataaaatcgataattttattttcatatcgcattctcctgtatatttaatgaattgcatacaaaatattatacgttacccatatatatgtaacaatctcgcgttttcatttttttgttgccgttacatgaattctttgcaatttacacatactatctccaggttttcgtaaaaggactaagaggaggtaaacgatgaagcagaaaatgatcgcagtgatggcggccgtcagcatcatgtgcggcggagctcatattgccggggcggcacagccgaattcaacagacgcagaaagaagccgggcaatggaaaaaatcgaaaaagcttatgagctgatctcgaacgaatacgtggaaaatgtagataaagaaaagcttcttgaaggagcgatccaggggatgctgtctacattaaacgacccttattccgtttatatggacaagcagacagctaagcagttttccgattctcttgattcttctttcgaagggatcggcgctgaagtcggtatgaaagacaataaaatcattatcgtatcaccgtttaagcaatctccggcggaaaaagcgggactcaagccgaatgatgaaatcatcagcataaacggcgagtcaatgaacgggaaaggtttaaacgaagccgtgctgaaaatcagaggaaaaaaaggatcgaaggtttctattaaaatacagcgtccgggaactgataaacagctgtcattccggattaaaagagcggaaatcccgcttgaaaccgtatttgcttcccgcaaagaatcaggcggtcatcatgtcggctacatcggaatatcgacattttccgagcataccgcccaggacttcgccgcggcgctgaaaaagcttgaaaaacaagggattgacggtctcgtccttgatgtaagagggaatcccggcggctaccttcaaagcgtcgaacaaattttaaagcatttcatcacaaaagacatgccgtatatccaaattgcggagcgtaacggcgataaaaaacaatatttctcaaccttaaaacataagaagccgtatcccgtcaatgtcatcacggataaaggaagcgcctccgcttcagaaattcttgcgggtgcgttaaaagaagcgggacattatgacgttgtcggtgacacttctttcggtaaaggaacggttcagcaggccgtgcctatgggagacgggagcaacattaaattgacgctttacaaatggctgacaccgaaaggcaattggattcacaaaaaaggcattgctccgacaatcgctgtgagccagccggattattttgcggcgggaccgcttcagctgaaacagccgcttcagcctgatatgaacagcgcggatgtcaagcacgctcaaatcctgctgaaaggcctaggcttcgacccgggcagagcagacggctatttcagcaaaacaatgaaaaaagccgttctggcgtttcaagaccggtacaggcttgataaaacagcggtcattgataaaaagacagcggaaaaaatgaatcagctgatgaatgaaaagaaatctgacgaaaaaaatgatttacagctgcaaatggcgttaaaatcattatttgtaaaataaatgaaaaggaggcgtttttttcgtctcctgtttcttttgtcatgccctaaaaatgaactaaaagacatataattatgtcggttttgacaagatattaaaaaaattttcacatttaaacatttataaaggacaaacattacccgatatttatagagaagagagactttatgccgagttaatatgtattcaaaatgaaacttttgaaagttgcctcagtcagttttagttcttacaataaaagaaggttctaatagagaacagttttagtttggcagctgcatttcagtatcgaaagcagaagtgtttgcggcgcttcagcacggcagctgtaatcacccgtgcttatctggataaaaaaatgggggttcacaattgaagagggcaagtattgtgcgtgaaaaaaaatattatgaattagtggaacaactaaaagacagaacaaaagacgtcacattttcatcaacaaaagcactaagtcttcttatgctgttcagcagatacctggtcaattatacaaatgttgaatgtgttcacgatatcaatgaggagtgtgcaaagcattatttcacctacttaatgaaaaaccataaacgtttaggaatcaatctgacggatattaaacggtccatgcttttgatcagcggtgtaatcgaggtggaagtcgaccactatctgaaagatttctctctctcaaatgtgacgttgtggatgacggaagagagatagacgtttgagatattcaagccaatgattatttggtagaatagaattaaaatgtttggcttgaggcggtgaaagcaatgtctgttcaatggggaattgaacttctgaaaagtatcggtctgttttttttgcacccgatgttttggttttttatcatcataagtctcgcctgcggatatttgcggattaaacgtgaacgccatacgtttcatacaaaaatcgcggatatgtatgacgagcttatctttacatacataaaaggacttataccgggtatacttctctccatattattttttggactgggaatttcgattccattcggtcttctcggcataatcgcggccgtgacggctttggcttcgctgacgttccgtatgaattggctgtcatcagcttatattgtcagcgccggcatgttcattgcgtttctccttcagtatacccacacagtgccgtttgcggatcggtttccgcaggcattcggcgtgaattgggcatcggcggccgtgtttatgggccttttgattatcacggagggagcggctgcctgccgttcagcgcatctgaaaacatctccggcgcttgtcgtcagcagcagaggcctgcccattggccgacaattggcgaatcgcgcatggctgcttccgcttttcttattggtgccgggcagcgggcttgagtcacacctttcttggtggcctgtctttaccgtgccgggcggctctttccatttgatctggattccttatatcgccggcttcggacagcgtgtgcaggggtcacttccggaagtcagcatacggataacagcgaaacgtgtcatgattctcggggttatcgtgaccgcattcggggcagcggccctttggtggactccgcttgccggagctgccgcttgtattgcggtgctcggacgcctgtttttatcattaagacagcggctgaacgataacgcggctccgttttatttctctaagcgggatcagggtttaatggtgctcggcatcattccgaatacacccgcggacgatcttgagctgaagatcggtgagattattacgaaagtaaacggcatccccgtgaagcatgtatcggatttttatgaagcacttcaaaaaaaccgcgcatttgtaaaaatggagatcatcggcctgaacggtgagatccggtttgatcagcgcgcgtcctatgaaggcgaacatcatgaattaggtattttattcgtgcaggatgaacacgagcacgaagaaatgacagcattataatgtgatttttcataattattcggaatagtttcaagaactcctaaactagatttcaaaataaaacagctaagaaaattatattttcttagctgttttattttgaaataataaaaaaataaatgaaggagaggtatggcttattggaaaggttattgctaactccaaaacctttagaagatgaatctttagcaggatatatattaagaataactgattataatggttatgttggatagggggagtacattataaaaaagcttttacttaagagattaccgttgatctcacttggagttatagcttatatactgacaaaatacgcgcagaaccatcaggattgggcggagaaatacagtaggtctgtatatccgttattgtcaaaaacagtaggacttgtaccttcttgggtcacattttctgttagtgaatggctcgtcgtgttggttgtgttactatttctattttatatcgtttattatgtgcgcaaggtcatcatgagtaaaggtgcacgtaggatggtagtttatcgtggtgctctaggaatcgttacgatctgtagcgtgatatatttttgttatactattttgggtggaataaactatcacagatattcttttttgtctcataccgaatataaagaagagaactacagcaaggaagaactggttaaattgagtaagtcacttgccgttgaaatggaattggcaagggaaaagttagcggatactgatcttttggctcatgtaccagaggtttttgattattatgcacaacacgcagtgttctcgatgcaaatgttatcaaagaaatatcctgttttggagcattcatattcaacaccaaaaccagtggtgatgtcaaaactaatgtcgcatgcagggatacatggtatttttgtcccttttacttatgaatccaatatcaatgttaatgtgcccgttttcttggtgcctgctactatggcacatgaattggcacatcagagtggtttcatgcatgaggatgaggcaaattttatagcatatctggcatgtaagcagcaggatgatccaatgatactttacagtggtttttttctagcatttgattattctatatctgagctaaagaaagtggatccagatcaggcgtctgatataatgtccagtctgtccaaggcggtgcagcatgatatagaacaaaatgagcagtaccgggataagtatgagggtgttattccaagtatttcaagaaatgtaaatgatgtatatctgaaggcaaataatcagacagacggtttgaatagctatagtgatatggtgaatttgttgctggcagagcagcgagagatagagaagtacaattaaatgtatcttgaatacttataggtttatatagtaatgatagtgggctcaagttgaacataggagtgagtgaaataaataaaataaaagtatttcctattccatatgctggagcgtcggtaaatgcatattatgaatggaaaaaactactgccggatagatatgaattgtgtatatgtgaattggctggaagaggaactcgattcacagagccttgttaccagtctgttggtgaagcaagtgaagatatcgccaaaagaataagtgaacaattagaatatgacgatgaatatgttatatttggacacagcatgggagccttattgacttatgagatatattataaacttaagcaaatgggaactaaggaaccaaggcatctgtttttttctgggcgaaatgctccacatatttttgaaaagagagaagacattgaaaatatgactaatgaaactttcttgacaaaggtggaacaatatgggggattaccagaggagttttatacaaaagagattatggatatgtttcttccgattttgcgagcagattttataattttggacaattataagtttcagcccaaagcagaaaaaataagctgtggaacaagcgttttttatgcggatcatgatttttcgactcatatcaaagaaattcataaatggagcgaagttgttgaagggaacgtgaaatttcataagtttaaaggagaacatttttttttgaatcggtatcctaatgatattgtaaatactattgttaaagatacagagacttattcttgttcatgagagattcctcgtttcgtcaatgttggtgtggtaacttacattgtacaagaggaatctctcttttgcattcattttttggtagaatttagataatcgacagacgtgttattatataaatctaaaaagattttggtttagactttcttgtcccaatcaagttccaaaaataaaaatttagactttcttttctttgtacagtttgaatgtgttttgaaatattatatttaaaataaattttatcagtctgagaatccttcaatgattgttacttaattttgcttaattataaaagtaatattcaataattgttttaggtaggttttagtaaggagaattatgaaaaaaattaagaaaaaacattggaaataataagctttcagttttattaattatgaaaaatcacatataaagagcccggtgccgctaacaacacggcggccgggctttttttacggccggattacgatgtcagcgccgaacttgatcggaactctcagccatttacattcaccttttctcttgtaaatcaaaagattctcatagagcaaacggcattgcggtgacactttgagagagaaaatgaagaaggaaaactagaaaaggttccggaaagcagatgcttacggaacctttttcgtttacgccgaatggctttttttcgtctgaacggtttccccggacttgataccaagcgatacgaacaagccgatcacagaaactccgatcaatatgataaacagaatatgaaacccggagattaaaccgatcagtgctgaagaaataatgcttccgaaataacggaaggtggagaaaatcccggatgcgatgccggacatgcccggttctaccgtcgcaagagaagatacctgcatgctcgtcagccccgcacctgacgcgatgcctccgactataagcgatgccataagaaacggaacggaatgggaataaaccaaaagcaaaaataagagattggctacggccatcagcccgaaggacagaaaaatcattcttcgcgcgccccatttctgatgcagctgagctccgccccagttgctggcggacatgaaaacagaaaagactgacagcgccatgccgctgtgtgacgtattcatgctgaagtggccggtcataaagagcggcataatcaataacacggcgtacatcattaaattgcttaacagaaccgacagattggcgctcgtaaaggtcgtgtttttaaacaggtcaaaatcaataatcggatgtttcgtgcgcagctcccgcctgaaaaatagcggaacaaatacgagaatgagcagtgcgtacacccaatagcccaaagagctttcacttttcgtcagaagaataatagatacaatgcttccggcaagcaaaacggacccgatgatatcaagcggagcgtcagacgtttcttctttatatttaggaaacatcactaatgccgtcaccagtgcgattgcaagaaacggaatgttgacccaaaagatcgaatgccagctgaagctctcaattaaaagagagccgataaacggaccgagagccgctcccagcccggcaccgaggccgaaaaagccgaatactttcggaagccgtttttcagacacgacatggcggatgatggcgatgctgtttggcgtaagcaaagcgccgccggcagcctgaagcgcccggaagaaaatcaataagaaaagacttggcgagagggcgcaccccaatgatgcgatgagaaaaaggccgacgccccataaatacatttttttgtttccgtacatatcaccgagtttgccggcaatgggctgtgtcacggccatcacgattaaatacacggtcactacccatgtgatgctggcaattgattcgctgaatgagcgggaaatggatgaaagggcgactgcgatcatcgtagaattgatgggaacgagtatggctcccagcaaaagcgaaacgatcagcgcccattctttctttgaacccatccttcatcctccttggagccggaaaatgaccggccggtaatgcctttcatgaaaatctcagtgctgtgtttcagcatcgtttcctcagagagagtgatgactcttttccccagctgcagccggtgtataaaataaccgaaaatcatcgtcataaagacgtctgcattagcttcttcactgccggggcttatcatatttttctttgtcagctccttaaagtaaacgattaaatgctttttcacggattgcggatatacgacaatatcctgcaggacgtcttcgaatagttccggttcgcgcaggcagatgcggaacacttcttttttttgttccaattgctgaagaagggtcgcggcgaaatgaagaagatcctcatacagatcgccttccgccttagtgatcatgctttccggaaccggcgtctgctgttcaatcatggctttcattaatccttgtttgtttttaaaattacggaaaatcgttgcttcgcttacttttgctttttctgcgatttcttttgttgtcgctgcgcggtatcctttttggatgatcagattcatcgcggcgtcaataattctcttgttcgtcgttctcaacatgtttcacctcgcgtaaatactggcaggacaagtatacacccgccctgcccgtcaataaagagggaaacctagcatgaagcgcgtttgacaatcgtaatcttgccgtttgtcccgtccaccgtgacgatatctccgtcgttgagcctgtcagtcgcggcacgtgtgccgagaacggccgggagcccgtattccctcgcgatgatcgccgcatgtgacaggatgccgcccgtgtccgtaatgacggcctttgcatcctggaacagactggtccacagcggtgtcgtcattttgcagacaagcacgtctcctgttgaaaaacgggaaaattcacttgcgtcacgaatgactttcacagggccgcttgcgattccgcttgacgccgcaagtccgtaaatttgatgttcagtgtttttttcatcttctgtgatggagccggtaatctgttcagccattttcagctgttccgaagtcggagtcccgagataagcgggggcttcaagcaattgatattgctggaagagctgttttcgttcagcggctttttcctgcatcggaaccggcgacgccagcgctttctcgacttcatcgctgtataagtaccacatatcctcccgatcatcgattacgccttgtttttgaagcagcccgccgattttcagaaggcaaaggcgcgctttggcgtccagcatcgcatcaatataaaaatggtgatcatctttgatgacggatgaagacaatgtccactgataatagcggtcaaacgtctcccggaagccgtcatcttcaattctatccataaagtcggcgtagagctgttttcgtttttctatcgttttatgaaactcactgtcaaaatcgtatccgttccggacatagttctgaatgttggccaaagcgaaataagggttttccgcccaagtttcttcaatgagatcatgacttttcacggatctccagccgtattcctgtaaaaattcaccgacttgttcgagaaagcgttttccctcatttgattgcagaagcgtctgatgcagctcatcggcatgagaaaccgtaaagacgcgccgcagctcagggctgtcttttacttgtccggaaagcagccacagctgtctgtcggtctccaatgacttattcatgacgccagccagcatttcgtacagaagggaggtgttttctttctcaacctgtccgtacatggattccagtatcatgtttaacgcaacctgcggaaagacaatattgaaatgttctgcgtatccttttaaatagaagtcttgcaggtttcggaacgcatcaagggcagtctccggcgtatggtctgtatgcgccagttcgtccagcttttgataaaaaggcagaaaggtttcctgaataatattgtacatgcggtcagccaagacggggaaaagcgcttctaactgttctgcgggcagcttgtcgtccgtcttatgctgtctggaaaaaacacgtccctgatgaagtttgacacgctcgatttcgatgcccattacagggaatgccttcgtgctctctttgaggccgtattccaaagccggcacaatgagtgaggcgaataacgggctgacggggccttctatattggcctccatattgagccaaaaatctttctgatcctggggcgtcataataaattcccgttcttcgtctgccgctttctgatcctgcacgatcgttgtaatcggcctggcctgaagcagatacagcttattttcggcaaatccgaattcgagatccacgggataaccgtacagttcttccgtctttatcgtcagcatggcaagctccttgatgctctcgtcatcaaggcagaagcggtttctcatgtcagcggtcgtctctttttccgtcacgccttcgtctttagaaacgatatacatttcttttaagccgatttctttttcaatctgaaatgtgtctttattgacgataaatgtgtcgggcgtcacgctgccggagacgattgcttctccgagaccgtagctcgcgctgatcatcagttctccgtcatcgtgtgtgacggggtttcggctgaaaatgactcctgaaacctcggaattgataagcccttgcacgacaacgcccattaatggttctgcggtgtcattgttcattttctctttataaccgctgacccgcgccgagaagaaggaagcccagcattctttcacttttccgagaaactcttcttctgttttgatatttaaataggtttcgtactggcccgcgaaagaagccccttcaagatcttcggacgcggaggaggaacgtacggcgacagaggcgtatgattctctcaattcataaaacgacgcggtcagttcctcccgaagctcttttgaaaacgtgccgttcataatggcgcgctccatctgttcctgatctgcttgaagcccgttgtcttccataaaacgtgtcagggcattcgtctgaatgatgaaaccgccgggaacgggcagcccgttttttgtcagtttaatcaggttcattccttttgctcctgcagagcggctcgattctcccgctttttgaaatcgcactgaatacatgcggtatgaccccctttttttcttcatccaagaaaaatgatagtaaacactatcattacattgtaaagagggaggaagaaactgtcaaagatacaaagacctaaaccttctcatcctttcggctgaagaaaggtaattcgattcatctggttaatggttcaatggatttatattcacaatttttttgacagatgattgaagactgctgaaaaagggtattgtgatagcaggggaacgattgtccgattcttcattttttactataatcagatgagatgaagaattcccgaggagggtttttgtgattacaaaagccgtttttgcattatgtttcccttttatgctggtcgtcctttttacgcgcgtcacgtttaaccactatgtggcgatcgctctcacagccgcactgcttttcgcatcctatttaaagggttacaccgaaacgtattttatcgttggattggatgtcgtatcgctggtggccggagggctgtacatggccaaaaaagaagcagacaaaaagaaagacaatgcctgacatggtgaatatgaaatagaatgcctgcttttacgccataaaagcaggttttttatacaaaaattgacttggtaaaaataaaccatcgaactttagttcgtatttttagtgattttgcccgtcattgtgttactatatcaataggaagatttcgtaaagaaacggaggcttttttgtgaaagatcgttttgagttagtctcgaaatatcagccccagggagatcagccgcaagcgattgagaagcttgtcaaaggcatacaggaaggcagaaaacaccagactctcctgggtgcgacagggacgggcaaaacctttaccgtgtccaatctgattaaagaagtgaataaaccgacactggtcattgcccataacaaaacccttgccggacagctgtacagcgagtttaaggagtttttcccgaacaacgctgtcgaatattttgtcagctattacgattactatcagccggaggcgtacgtgcctcaaacggatacttttatagagaaagacgcaagcattaatgatgaaattgataaactgagacactccgcgacatcctctctgtttgaacggagagatgtcattattatcgcgagtgtgtcatgcatatacggtctcggttcgcctgaagaatatcgggaaatggttgtgtcgctcagaccggaaatggagattgagcgaaatgagctgctgagaaagcttgtggatatccagtatgcccgcaatgatatcgactttcagcgcgggacgttccgcgtgcgcggagacgttgtggaaatctttccggcttcccgtgacgaacattgtatcagagtggaatttttcggagatgaaattgagcggatcagagaggtcgacgctttgaccggagaaattctcggcgaccgtgatcatgtcgcgattttcccggcttcccacttcgtcacccgggcggaaaagatggaaaaagcgattctgaatattgaacaggagcttgaggagcgcttgaaagtgatgcacgaaaacggcaagctccttgaagcgcagcggcttgagcagcggacgagatatgatcttgaaatgatgcgggaaatgggtttttgctcagggatcgagaactattcaagacatttgacactccgaccgccgggctctacgccgtatacgctgcttgattattttccggacgattttatgattgtcgttgatgaatcacatgtgacgattccgcaggtgcgcggcatgttcaacggtgaccaggcgagaaaacaggtgcttgtcgatcacgggttccgcctgccgtcagcgcttgacaaccgtccgctccgattcgaggaatttgagaaacacatgcacaatatcgtgtacgtgtcggcgactccgggaccgtatgaaattgagcatacgccggaaatgatcgagcagatcatcagaccgacgggactcctcgatcccctcattgacgtccggccgatcgaaggacagattgatgatctgatcggcgagattcaggcgaggattgaacggaatgaacgcgttctcgtgacgactttaacgaaaaaaatgtcagaggatctgaccgattatctcaaggaaatcggcatcaaggtcaattatctgcattccgagattaagacgcttgaacggattgaaatcatccgtgacctccgcctcggaaaacatgatgtgttaatcggcatcaacctgctgagggaagggcttgatattccggaagtgtcacttgtcgccattctcgatgcggataaagaaggcttcctccgttctgaacgttcgctgattcagacgatcggacgggcggcgcgaaacgcggaaggccgcgtcatcatgtatgccgataaaatcacgaattcgatggaaatcgcgattaatgaaacgaagcgccgccgggaacagcaggagcgctttaacgaaattcacggcattacgccgcaaacgatcaataaggaaatccgcgatgtgatccgcgcgacgcaggccgctgaggataaagaagaatataaaacaaaagccgcgcctaaactggcgaagatgacgaagaaagaacgccagaaagtcgttgagcaaatggagcacgaaatgaaagaagcggccagagcgcttgatttcgagcgggcggcagagcttcgtgatttactgttagagcttaaagcggaaggatgatgaacacatggcaattgaccggatcgaggtgaaaggcgcaagggcgcacaatttaaaaaacattgatgtaacgattccgcgggatcagctcgtcgtcgtgacggggctgtccggatcgggaaaatcatcccttgcctttgacaccatttacgcggaaggacagaggcggtatgttgaatcgctttctgcctatgcgcgccaatttttagggcagatggataagccggacgttgatgcgatcgaagggctttctccggcgatcagcattgaccagaaaacgacaagccgcaatccgcggtcaaccgtcggaacggtaacggagatctatgattatctccggctgctgtacgcgagagtcgggaaaccgcactgcccggagcacggcattgaaattacgtcgcaaacgattgaacagatggttgaccggattcttgaatattcggagcggacgaagcttcaagtgcttgcgccgatcatctcaggcagaaaaggcgcccatgtcaaagtgcttgaccaaatcagaaagcaaggttacgtaagggtgcggattgacggagaaatggccgagctttccgacgatattgaacttgaaaaaaacaaaaagcattccattgaagtagtcattgaccggatcgttgtcaaggaaggcgttgccgcccggctttccgactcgctggaaaccgcgctccgtttaggggaaggccgtgtcatgatagatgtcatcggtcaggaggagctgatgttcagcgagcatcacgcctgtccgctgtgcggtttttctatcggggagcttgaaccccggctgttttcatttaacagtccgttcggcgcctgtccgacttgcgacggtctcggcttgaagctggaagtggaccctgagctcgtcatccccaatcccgagctgtcattaaaggaacacgccatcgcgccgtggacgccgatcagttcacaatattatccgcagttgcttcaggcggtctgccgccattacggcattgatatggagactccggtcaaagacctgccgaagcatcagcttgataaagtgctgtacggcagcggcaatgaacggatctactttaaatacgagaatgatttcggacaagtgcgcgaaaatgaaattgaatttgaaggtgtgctgcgcaatattgagagacggtataaagagacaagctccgattatatccgtgaacagatggagcagtacatgtcacagaaatcgtgcccgacgtgcaaaggctaccggctgaagaaagaagcgcttgccgttttggtcaacgggcgtcatatcggaaccattaccgaactttctgtcggcgacgcgcttgaatttttcaaaaacctgacgctgtctgagaaagatatgcagattgccgatttaattttaagagagattgtggagcggctcagcttcttagataaagtcggtcttgattacctgacgctgagccgggcggcgggcacgctgtcaggcggagaagcccagcgcatcaggcttgcgacgcagatcggctcccgtttgtcaggcgtcctgtatattcttgatgagccgtccatcggccttcaccagcgtgacaatgaccgtctgatcagcgcgctgaaaaacatgagggatctcggcaacacactgattgtcgttgagcatgatgaggatacgatgatggctgccgattatttgatagatatcggtccgggcgccggcattcacggcggccgcgtcatatcggcggggacgccagaagaagtgatgaatgatgcggactctctgaccggacgctatttgtcaggggctcaattcatcccgatgcctccggagagaagaaagcctgacggccggttcattgaaatcaaaggcgcttcagaaaacaacctgaaaaaagcgaacgccaaattcccgctcggcacttttacggcggtgacaggtgtgtccggttccggaaaaagcacgcttgtgaatgaaattctgcataaggcgcttgcgcaaaagcttcataaagccaaagcgaaaccgggaagccataaagaaatcaaaggccttgaccaccttgataaggtgatcgacatcgaccaggcgccgatcggccggacaccgagatcaaatccggcaacttatacgggcgtgtttgatgatatccgcgatgtattcgcgcagacaaatgaagcaaaggtgcgcggctataaaaaaggccggttcagttttaatgtaaaaggcgggcgctgtgaggcctgccgcggcgacggcatcatcaaaattgagatgcatttccttcctgacgtgtacgtcccgtgtgaagtgtgccacggcaaacgttacaaccgggagacgctggaggtcacatacaaaggaaaaagcatttctgacgttctggatatgacggtggaagatgctctgtctttctttgaaaatatcccgaaaatcaaacgcaagcttcaaacgcttgccgatgtcggactcgggtatgtgacgctcggccagccggcgacgacgctgtcaggcggagaagcgcagcgcgtcaagcttgcttccgaattgcataagcgttccacaggccggacgctgtatattctggacgaaccgacgacaggactccacgttgatgatatcgcaaggcttttggttgtgcttcaaagactcgtcgataacggtgataccgttttggtcattgaacacaatctcgacatcattaaaacggcggactacatcgtagacctgggacctgaaggcggagcgggcggcggcacgatcgtagcctccgggacgcctgaagaagttgtcgaagtgaaagaatcatatacgggccgctatctgaaaccggtaatggaacgtgataaaaaacggatgaaaacattgctggctgaaaaagaaacggcagccacataatagatcaataaaaacagcccaaaactcaccggttttgggctgttgtgttacaggcttttttctgttggggaagctgtctgcttaaatgcattaagtcctgcagaatatgggtgctgctgctgtccagcagcacttttatatattggatatcatgggaaatgggaagaggggctgctttgatctgttccaattcagccagcatttcgctgttcattcttttctgttcgcgaattaaatttagaagactctcttccgttacttgggcgttttcgggatctttctccatttgtatgtcctccttgcatacggtcaggctttgttacatattgtaatcggttcggggaaaagattctatagtgaaatctctgaaatcaaaaattacgtataacgaagcatgtccttagcatgaaaatgaaacccgcccattcgtcatacgtatgtataaggaagggtttttacatcacggcacagggagtgtttttattgaaccgaaatcaagcgattatcgcatcaatctgttatttcagcgtgtttctcgcgccgctcattcttccgattgtggcttactttgtcgtcgatgaaaaagagacgaagcggcatgccatgcgcgctctgatttcccatatcattccgtttgcgggattgctgattgtgaccgcgggtgttgtcggcggattgattacggctcagggggagagtatggtgcccgtttttgttatgataacaggagcagctgtttattttctgatcctcatcggaatggtcatttggaatatcgtgcagggaattaaggtgttacgccaggtgtaagaaaagtcgggggaggcgttttgtatgaaacaggagaaagaacggattttaaagcttgtggaagacggcatgctgacggcgcaggaagcactgacgctcattgaaaaactggatcatgaatataaagaaaaagaagagcagatcaccgcattatctgcggaggtccaggaacctgcggaagatttcgaaagcggggcaaaaggaagccaaaagccgtcgctcggggcgaagctgttcgactggattgattctgccgtcaaaaaagtgaaggaagcggatcttgatctgaatttcggccacgcacacgaagtgcagcatatttttcaatttaaagacagtgaattctcggccattgatatgcagattgcaaacggcagcgtcaatatcgtgccgtgggcggatgaagatatcagagcggagtgccaggcgaaagtgtaccgggcggacagtcaggaggcggcgcgcaccgcatttcttcagcacattgagtgtgaagtgaagggcaataagttttttgtccgcacggaaaagaaaacgatgaaaaccaatgtcacgctttatgttccccagaaagagtacgataagataagagtgaagctgtttaacggaccgatcagaggggaacatttacatgtaaaagaattctcggcgaaaaccacaaacggcgttctgtcattctctcatttgacggctgataaagcgtcggcggaaacagctaacggacaaatcaagctggccggacatcaatgcggcgcgattgaagcggaaacgatcaacggcttgattgatttgcgcggatcgagtgaatccattgacgttcaaagctttaacggcaatatcatgcttaccgtgacagcgccgcactgccgctccatctacacgaaaacgacgaccggaaacgtggagatcgctctgcctgatgattcggcggtgaaagcggagctgaaaagcaatctcggctctctcagccatgagctgattgatgcggaaattttaaaggaaaagaatgataccattcaaaaagaactgatgctggcatcaaatcaaggccatgatcagcatctctcgattttctcagaatcgttaacaggagccattaagctcaagcatactcagaggtgattggatgaaaagactttaccgttcagaaaaaaaccgtaaaatcgccggcgtcgtcggcggtttggcggagtacgtcaatatggatgcgtcgcttttgcgcattatcaccgttgtattagcgcttgtcacgagcggaatcgtgccgattgtatatattatctggtgttttgttgtacctttagaaggagatttgaaataaatgatcaaatgggcagtcagcattttagtaaatgctttattattaatcgttatcgcgggatattttgattccgtccatatcagcagtatcggagcggctgtcatcgccagtgtggttctttctgtgttaaatgtgctgatcaaaccgatcatcatcatattgacattgcctgtcacggttgtgaccctcggcctctttctgtttgtcatcaacgccattacgttaatgatgaccgcagccttgatgggagacagctttcagattgacgggttcggcaccgccatttgggcgtctgtcgtgctgtccgttttccacttgctgatccaaaaaggcatattggagccgcttagaaaaaggtaaaaaacgagctgtcccgagagggcagcttttttatgtgtgatttacataagcggcagcctcctgacgcaacataatgtatagggaggtaatgagatgaaacttgtgatgacgctcttttttctgattggtttgctttgtgtgagtccttctgcggatgcggcgcgcaaagaatcggcaatccccgtgaatcagcaggaattcggacagccgcctcattacataccgcttctggagaatcctccccaaatcgaagtaaaggcggaaatgaaaagaaacctgttcatacaggctcatgtacggaatgctgactatcaagcgttttcggcgtttcttttttataaacaaagcaatgagctggggtttaaaatggtgccgatggagcccgcgccaggcgcaatccggctgtttacggcccagatttcaaaacgggatatctggaatggagaattggaatattacctcgttttcaccaacggcagacagcgggcggaatcggagaaaaagcggctgaagctggacggctatcaagccgatttgaatcatattcccgagctgatgattacggagcttgcggttgatacgaaaaatgaagacggcgctgatgcctatgaatttatcgaggtgtataacacgacggacaggcccattcattttaaagactatcacatccgctaccgctatccgaaggaagggccggaatcagacatgatatggaggccgaaagaagataccgtcattccgtcaggcgggacttacgtgttttggctgagacgcgccgcatcagaactgacgatagatgatttcaaccgctattacgggacacgcctgaaggagggaaaacatctcgccgtcatcgaagggacggacggaatgtccaacggccgcccgcgtacggtggtgctgtcggcaaataccggcaaggatatcgcctcggcgcaataccggaaacacgctttccgccggctgacttctttgctgtacaaatatccgctgaacggaacgggagaattgctgaggatctccacgagcgagcataagccgtcaccgggctctgtttttcaggcgcagatcccgcagcagaaaagggtgataaaacccgacaaggaaaaaccggtcatcgaagaccttacagacagaaagcccgtccggcccgctgaaagcattgaattaaaggctgacataaaagacaaaaaccttgtcaaaacagccgcgttttattaccggaccaatgagaaaaaaccattcaaacgaattctggccgaaaaagaccgcaacgacagcttataccatcacattctttattccccggagctgctcggccaggatcagcttgagtattatatcgcagccagtgatggagaaaatgaagcaaaaacgcccgtcaaaatgattgacattgaacagacgagcaaatcacacggactcagaatgaatgttgaatccgaagatacgatatccggcacctatctgctcaaagcgacttccgacgtcagcgccgataagatcaagctgtggattgacggcaagcggcaggagacccggccggcgctggaaaaagaggtctatttcgccttcgatgcccggaaaacgaatctttattttcaaaacaccgtcataatggaaaatgaggtgctgcacatttttgacgatccgtctcaccgctacagaacgcactcggttctccttccggaacgtctgctgcaaaaagggggcaaaacgcagaaagtatccatccgttcgggctcaaaggtttctccgtatgacacgggagagaatcgggatgattttgtcgtgaaacatgcccgtctggtgctttcggacggaacggtgatcaaagacgggaagacggatccggctgagcagctctttatcggtgacggcaggcgggcgaatcagcagaagaccttctcattcagcctgccggatcatttgtttacgtcacggctgctgccgtggaacacggcgaagctttctgaaggctatcaccatatttttgttagcgacggggaggagcagctgagccaatctgtgcgggtggacaatacggggccgaagattgtcccgggtatcaaagaaggcgcggcgctgaaaggtaatgttgagctgaatgcggacatccgtgacaaatggagcaaagtggaagaggtcaaagcgtttttggacggagaaagcattacgctcccccatcacacgtcatcagccgatctcaagcccggaaaacatacccttaccatcattgcggcagaccttgccggaaatgaaacaacgtccgtccgcaccttccatatcaaacgggaggagccgaaccagccggagcttgccgatcaaaaaatcggcgcccacaaagcaaagctgtccgtccgggtaaaagacccgacgaaggatgacatgaatgtatcattttatcgcggcttccgttataccgcgcggaatccgggcagcgtgaaagtgtataaacacgcctcattgacggaaccgccgaggggcataaaagaaaatgaaatgccgtttaccctgccggaaatgaaccgcatctcggcaaatgacggaaaaaccgtatcggcggaaagtatggagcgttttccttatcaccggttcgaagtctccgttgacccgtctatcgacgaaacggatctggccgaggcggtctggaaaggaagctctctgcccagccgaaaggtaaccatgtatatttggaattaccggacaagccgctggcaggaggcggacagcgttcttgccaaagataaaaagccgtttacattaaaagccgccgtttccgcagcggatgtggtgaagaactcaaaaatgaatgtcatcgtgcaggatcaaataccggcgaaaggcaattacacgtttgtctggatgtcggatacacagtattacgcacaagggcacccgcacatttttgacaaaatgacggagtggatcaaagaaaataaggaaaagcacaatattaaatatgtctttcataccggcgatatcgtcgatgattcaatggtgatgaaacagtggaaaaacgccgatcactccatgcggacgcttgacaaggcggggattccgtacggagtgcttgccggcaatcacgacgtcggccataaagacggcacataccgaaccttcggggatttcttcgggagccgccggtttgaacagaacatgcattacggcggatcatataaaaataaccgcgggcattatgacctgctgtcggcaagcgggaacgattttattatgatttatatgggctggggcattgcggaacaagagattgactggatcaatcaagtgctgaaacggtatccggaccgaaccgccatcttatgctttcatgagtacttgcttgtgagcggaaatcgaagcccgatcggggaaacgatctatcgaaaagtcgtcaagccgaatcgcaatgtggcgatggtattaagcggccattaccataacgccatgaaaaaaaccgatgcgcttgacgatgacggagacggaaaaccggaccgcctcgttcaccaaattctgaccgactaccaggacggtccggaaggggggcagggctttatgcgcatgatgcaattcgatcaggccgccaatcaggttcacatgttctcctactcgccgtacacggatgacatcaattactatgacaccgatctgttcgctgataaagacgaattctcagcagaaatggatttacagccgaagaggaaaagggtagcgaccgattattttgaatgcaacgtctatacgaacgaactgctcggtcataaaaaacacgtaaaaagcggaaaaaccgcaaattgggtctgggacggcctgcagcctgattccgtttattactggtacaccgttgttaaggacccgtacaacggcaaaacaatatcaccgttgtggatgttcaaaacgggaaatacgccgtatcgcccggctccggatcagtttgatttcaggcatgcctcaaacccataacgaaaaaaatacagcctgctgatcgctcagaagaaaatctgacggtcagcaggattttttctgtgcgtaaatggcggcgccctgctgtgataagtgcttttgacttttttatgtcccttttctatactaaaatcgattggttttcgtaatatgcaggaggaaacataatgaacagtaaaaccgggacaaaagaaagaattattcaaacctctgcatatctttttcagattcagggataccatgcgactggtttgaatcaaattataaaagagagcggagcacccagagggtctgtgtatcatcactttccaaacggaaaagcagaactcgccattgcggcgatcaaacatacgggaagatgcgttgaaaagcaaatacagaatagtatgtctcaattcgcggaccctatagaagcgattcagcactttattcatgtaacggctgaacagtttaatgatccgcagaatattgagggcgtgccggttggattgctggcgggtgagaccgctctgatcaatgaaacgttaagatgcacatgtgttgaggtgttcaagaagtggacggatgtgtttgcggcaaaatttcttgagcatgggtttgaacaagaggaagcggagaagctcggggtgacaatcaactcgatgattgaaggcgcaatcatgttttcactggctcataaaaacaaagaaccgctgctgctgatttcaaagcaggttccgtatattgtccaaaacagagggtagcattttattactcttttctttataaaaatagatatcagaaccccagcctctccgttttgacagagtcatagagaacattcaccggcttgatttgaaaatggcagatcaaaaaaacatctccaacccgtaacggttggagatgtttcatttcaccctgtccatataatgcacgaatgtgtagcggtcgcctctgtaggcggatttgacgtgctcaaaggcagtgccgtcctgcagataagtggtccgcttgatatagaggacgggggcgccgggctggataccgagcagctcagcttcttcctcggaagcggctcccggttcaagctcttgttttgcccgtgagatcggcatctgattgtacgcttcaatatgctcatacatggatgattgaaaatgggaggcgtccagttttcccgccttgtcaaacgggatgtacgatgcctcaatcgccatcgggatatcatttgccagccggacgcggatgattttatgaagcgttgccggatagccgcatcccaggatagaagataattcttccgtcgcctgaatcagctggtattcggcaagtctgctccccggcttcatgccccggcttctcatatcttccgtaaagcttgtcagcccttgaagcggctgttccatcttcagtttgctgacgaacgttccccggcctttctgcctgtataaaaatccttcattcaccagattggaaagcgcctggcgcaccgtcattcggctgatgccgaattgttcggcgtattcccgctccgacggaagcagcgcatccgcttccagctcgccgtttttgatttgtgtttttaattgttccataatctgaaagtaaatcggaatcggagattgtttatcaatctgcataggtcaaatcctttcaatcgccgcccgcagccttttcatcaatcaagaccgtcacatccggatgcgcgtgcagggcggaggcggggaatgcttcgctgatgcgcccgtccagaagctgcttcaccgcttgggccttgctttttccggatgccatgatcaaaatccgtttgccggacaaaatcgtcccgatccccattgtcagggcttttacagggacttgatcaattgacggaaagtaccgcgcattcgcctgtcttgtctcttcattcagctcaacgacatgggttcgggattcaaatggcgtcccgggttcattaaagccgatatggccgttgtgtccgatgcctaaaagctgtatatccgctccgccgagtgtttgaatcaatcggtcatatcgtccgcattcggcatcaagatcgtctgcccgtccgtcagggagaaagcggcggtcctttcggctatcgatatgtgcaaaaaaatgtgtattcatataataatgatagctgtttttgtcctcgggagaaagcccggcgtattcatcaaggttgatcgtcgtgacatttcggaatgacaagtcttctgagcggtgcatccgcacaagttctttgtatacgccttcaggggtgcctcccgtcgcaaggccgagaacggcatccggcttttgtttcactgtttcagcaataatcgctgcggctttttcacttaattcttcataatgtctgcatgtgataacgttcatgtccaatcagcctcccttgagatatatgcggtgtttccgcggcaaatcgtggccagcacgccgcactgtccgtccgtcagaacaacgtcggcgtcttttccttcggcgatgcttcctttgcggtcgaatatgccgaggcggcgggccgcatttgccgatgtcatatttgctatatccagccatgagcagtttgtaaacctgcgcatgagcgccgcgccttcattcatttttaaaatggaaccggccagcgtcccgtcagagagaagcgccgtgtccccgcgaacggtgactttttgtccgccgaattcgtattctccgtccttaagcccttttgcccgcatggagtctgttatcatgatcaggtttttgcttcctttcgccaaataggcaagcttaacggccaaaggatgggaatgaatgccgtcagtgatcagctccgccgtgatgcggccgcaggcgagcgccgtaccgatgccccccggctcacggtggtgaaaggagctcatggcgttgaagaggtgtgtcatatgcagtgctccggcatccgccgctttttctaaaagatcggctcccgcgtctgtgtgtcccattgacgggatgatgttttggtcttttaaataacggatcaggctgaaatcaggatcttcttccggtgcaagcgtcacgattttaatcagacctccggagagacgctcccatttctgaaagagcccggcatcagcaggagtaatccattgtttcggctgtgctcccgcctttttcggagagacaaacggtccttctaaatgaatgccgatcaactcagcgcctttttggacctgaggtgaggaagacgcccattttttggcgttgacgagcgctttttcaatgttttcgtgctgctgtgtgatcgttgtcgctaaaaaagaggttgttccttcttcgggcagccgggcggacattgtatcaagagctgcaacatcagcatccatcgtatccgcgccgtatccgccgtgaatatgaatatcaatcattccgggaagcgcatacgagcccgcgggcgccttccattccttctcatacgtttcttgcggtcttgttttccccgcgtaagaaatgatgccgtcctttataccgagaaaaccgtttcggatgatttcttcttctgttacgatgtccgcaccgctgattaacaagctttcagccactttaaaacacgcctttctggttagttgttagttttattttactctttttcagactagttatctagaccagttatgccggaattgtataaatctgttttggttcagacggtaaagtgataaaatataactgttcaaagctcggaacatcccagaacaggaggaacatatcttggcaaaggttcggaccaaagacgtaatggagcagttccatttagaattgatcagcggagaagaagggattaaccgcccgattacgatgagtgatttatcacggcccggtattgaaatcgccggctattttacatattacccgagagaacgggtgcagcttttaggaaaaacggagctgtcatttttcgatcagcttcctgaggaggataaaaaacagcggatggaatcgctgtgcaccgatgtgacgccggctatcatactttccagagatatgccgatcccgccggagcttgtagaagcatccgagaaaaacggcgtgcctgtgctcagatcccctctgaaaacaaccagactgtcaagccggctgacgaattttcttgagagccgtctcgcgccgacaaccgccattcacggcgtgcttgtggatatatacggcgtcggtgtgctcataacgggaaaaagcggcgtcggtaaaagtgaaacggcgctggagcttgtcaaacgcggccatcgtcttgtcgcggatgactgcgtcgaaatccggcaggaggatcaggatacgctcgtcgggaatgcgcctgatctgattgagcatctgcttgaaatcaggggtctcggcattataaatgtcatgacgctgttcggagcgggcgccgtcagaagcaataaaagaattacaatcgtcatggaccttgagctttgggagcaagggaagcaatacgaccgtctcggacttgaagaagaaaaaatgaaaatcattgatacggaaattacaaaactgaccattccagtccgccctgggcgaaatctcgccgttattatcgaagttgcggcgatgaacttcagattgaagcggatgggcttaaatgctgccgagcaatttacgaataagctggcggatgtcattgaagacggcgaacaagacgaataggagttggcaataatatgaacgaagcaggaacaccaatcaatccgattgccttgcagctcgggcctttatccgtgcactggtacgggatcattatcggcgcgggtgcgttattagggctttggatggccatgagggagagtgaaaagcgggggctgaaaaaggacatttttattgatcttgttcttttcgccatcccgatcgcaatcatttgcgcacgggcatactatgtgcttttcgagtggagctattactcggaacaccccggggaaatcattaaaacctggaaaggcggcatcgcgattcacggcggattgatcggcgcgatcgcgacgggaatcgtcttttcaaaagtaagaggcatctcattctggaagctggcggatattgccgcgccgagtattctgctcggccaggccatcgggcgctgggggaactttatcaaccaggaggctcacggtgaagcggtcagccggtcatttttggaaagtctgcatcttccggatttcatcattaatcagatgtacatagacggacaatattatcacccgacgtttttgtatgaatcgctgtggagttttgcgggcgtcgtgattctgcttctgctccgccgcgtgaacctgcgcaggggcaatctgtttttgacgtatgtgatctggtattcgatcggcagatactttattgagggaatgcggacggacagcctgatgcttacgagccagcttcggatcgcgcaggtcatttccattgtgctgattgtacttgcgattattttaatgattttcagacgcatgaaggggtatgccgataagcggtatgctgatacggactgacgcctgaaatcggaaaggacataagatgactgataaacgtgtaaccgccattttatttgatctcgacggcacgctgattgacacgaatgaactgattatcgcttcttaccttcatacgcttgatcattattgcccggggcagtttaaaagggaagatgtgcttccatttatcggcccgcctctgtatgaaacgttttcaggcattaatgctgaaaagtgcgatgagatgatctgcatgtacagagcattcaaccatgaaaagcacgatgaactcgtcacggagtacgaaacggtttatgaaacgctggatgaattgaaaaaagcgggctatcagcttggtattgtcaccacaaagctgagggatacagtcaatatgggattgaagctgacaggcatcggggcgtttttcgatactgtcgtcacgcttgatgatgttaagcacccgaagcctgaccccgaacctgtgcggcttgctctcagccggcttgggtgcgatccgtcggaagccataatggtcggtgacaattatcacgatgtcatggcgggaaaaaacgccggcacgaaaacagccggcgtcgcgtggacgattaaaggcgcacagacgctttccgcctatgaacccgattatatgctcgagaaaatgagtgatttattgcacatcaccggagtgaagtaatccgtgagaaaaacagaccgccatccggtttcaggtgcaaattcattgtggcatgtttatcagacggttccctttctgaaggtgatgaaaaatttcatcatcattcagatcgcaaggtatacgccgtttttaagcgtgaaaaactggctgtaccgaacctttttgaaaatgaatgtcggaaaacagacgtcattcgcgctgatggtgatgccggatatcatgtttcccgaaaaaatcactgtcggaaaaaacagcatcatcggctacaatacgacgattttggctcatgaatatttaatacatgagtaccggaccggttttgtcacaatcggtgacgaggtgatgatcggggcaaacacaactattctgcccggcgtcaccatcgggagcggagccgttgtatcagccggcacgctggtgcacaaagatgtcccggccggggcgtttgtcggaggaaatccgatgcaggtgatctatacggacgaagaaatgaaaaaacgaatggaaaaccccgctgattaacgtcagcggggtttttttatgacttgatcacaatggcctggctgcccatctgcttccaggctttttcaaagtcagatcggtttgtttttctgtttttatagccgtaaggatcattaacgtatacataatcgtgatcataaccggtaacggctacgctatgcatgctgaacgtaatgtcgatttttccgttcggcgtattccaagtctgcatattatcaaccggcttaaaggatgtggtggtaatcacccagaccggccgccctttttcaagctggcggtacactgaagaaatgtcttttcccgtcagatcgtatactttgtttcccgcatattctttggcgagtttatcaatcggctcatgataaacgcctaaacccgggccgttttccatatctccggcaaatccttcattcggatctcccttcagcccgctgctgtatgtgagcggaactttattgattttatccgccaatgtattttttgatacatgatatccggcattgttcaaaatcatagcaaggcttgtcacctcacagccattgtacagtctgggagaatccatctgtctgtacagaacgacattcagcggtgacgcgctcccttttaacggtgttttctcatcaggctcgtcggactgctgattaaaaaaattcaaatgaatatcgtttgtatagatgttatacccgagatagacaaggatggctgtcagaatcaccacacataatgttccaagcgtcttcattattactctcccttgtttctgatgaagctattctatgtattatagcacttctgctcaatatgattcgatcgttccgatatgtttacaggtttgttcattctttagccatgtttatggaaaagaataggcggacattgggcgttgcaattcattcttttatctgctaacatattatcatattagcgaactaaaggattcggaattttccttcagacaaagcggaggtgtaaaaggcaaatgtttatgtttgagaaaccgcatggcatgagagatacgctgcccggtttatacgaagccaagaaaaaagtccgttccacactgacggatttaattgataaatggggttatcagtttatggagacgccgacccttgaattttatgaaacagtaggcgtccagtcagccattgaagaacagcagctgtttaagcttctcgatcaggacgggaaaacgcttgtgcttcggcctgatatgaccggaccgattgccagggtggcggcgtctaagctgcacaaacacaatcatccgctcagagcggggtacgcggcaagcgtctatcgcgctcaagagcgggaaggcggacgtccggccgaattcgaacaggtcggcgcggagctgatcggcgacggatcaacaagcgcggacgccgaggtgattgcgctggcggtcggcgctttgaaaaacgcgggattgcaccggtttaaaatcgcgatcggccatgccggactcgctgatgagctgtttgtcgaggttctgggcaatgctgagcgggcggatgttctgcgacgctttctctttgagaagaattacgtgggatacagggaacatgtcaaatcgcttccgctttcttcaatagataaaagccggctgctcacacttctggaattgcgaggcgggaaagagatctgcgccaaagcggaggagatcatcggcatctccggacaaagcttgattcaggagctggaagacctgtgggacattcttgaggattacggatgtgccgagcatattcgccttgatctgaatatggtaagccatatgagttattacacgggaattttattcgaagtgtatgcggcaaatgtcggttttgtcatcggaagcggcggacgctataacaatcttctcggccatttcggcagtcccgctcccgccacgggtttcgggctccgtatcgacaggctgattgaagcgctcggcatccaggaagaaactagtgaagcggacgccgtgattttcagcaaggagcagcgggcgcaggccattttattcgcggaggaagaaagggcgagaggcagaaaagtcgtcctgcaggatctggcgggcattgaaaatatcgatcatatgacaaaatcatttgcaaacgtcacatactttatcggtgccagaaaggaagagcagaatggataaggtactcacaatggcaatgccaaaaggacggatattcgaagaagcggccgggttgctgcggcaggccgggtacaggctgcccgaggagtttgaagaatcgagaaagctgatcattgacgttcctgaagaaaatctccgctttattctggcaaagccgatggatgtgacgacttatgtcgagcatggcgtcgctgatgccggtattgccggaaaggatgtcatgcttgaggaagagcgtgacgtgtatgaggtgctcgatctgaaaatcagcaaatgccatctcgccgttgcggggcttccaggagcggattggaacggagtcgccccgaggattgcgacgaaatatccgaatgttgcgtcaagttatttcagagagcagggcgagcaggtggaaatcattaagctgaacggttcgattgaattggcgcctttaatcgggcttgctgacagaatcgtagatatcgtatcaaccgggcggacattaaaagaaaacggtctcgttgaatcagaacatatttgtgacatcacatcgcgttttatcgtcaatccggtcagctaccgcatgaaggatgatgtaatcgacgaaatggcggccaggctggccagggttgtggaaggagaaacggcacaatgaaaataacggcagtaaaaagaagcgagcggttctcactgaagcgttccatcgacagcggaaccgaagagcagcggaaaaccgtcagggggattattgaagacgtcagacaaaacggtgacaaagccgttttggcctatacaaaaacatttgacggcatcagcctgaaccaaatggccgtgagtgcagaggaagtcaccgaggcgtaccgtctgcttgatgatcagctgctggaagtgatcagacaggcgattgccaatattaaagaatatcacgaacgccagctgcaatcctcgtggttttaccatcgcaaagacggctcgatgctcgggcagaaaataacggcgctcgattccgcgggcgtatacgtgccgggcgggacggcggcttatccgtcttccgttttaatgaatgtcatccccgctctcgctgcgggagtggaacggatcgttctcgtcagtcctccgggaaaagacggccgcctttcgccgggcgttctggcggcggcgtctgagctcggcataaaggaaatttacaaagcgggaggcgcgcaggcgattgccgcgctcgcttacggaaccgaaacgatacagcctgttgataagatcacgggccccggcaatatatttgtagcactcgcgaagcgcgaagtcttcggcgttgtggatattgacatgattgccgggcccagtgaaatcgtggtccttgcagacgatacggcggtgcccaaagaagtcgccgctgacctgctttcacaggccgaacacgatacgctcagctcaagcgtgcttgtcaccgactcacggaagcttgccgaagccgtatcagatgaggtgaataaacagcttcagacgctgccgcgtaaagaaatcgccgaagcgtcgatcaaggatcacggccgcatttatatcgcggaatcgatggaagatgcagtggacacggtgaatgcgctggcgcccgagcatttagaaatcatgacgcattcgccggaggctttgcttggaagcatcagacacgcgggggcgattttcttagggcgatacagcgctgaaccggtcggcgattattttgccggaccgaatcacgttttgccgacaaacggaacggcgcggttttcaagcccgttgaatgtaacagattttcaaaagaaatcgagcatcatctcatacagccggaaggcatttgaaacgcacgcggacagcatttccgccttcgcgagactggaagggcttgaagcgcacgcaagatcgattgaagcgagaaacggaggaatgaccgatgagaaaagcggaacgcgccagaacaacaaatgagaccgatattaagctggctttcgaaatagacggagaaggaaaagccgacatcagcacggatgtgccgtttatgactcatatgcttgatttgttcacaaagcacgggcaattcaatttaactgttgacgcaaaaggcgatacggagatagatgatcaccacacgactgaagatatcggcatctgcttagggcaggcttttttggaggcgctcggtgataaaaaagggatcaaacggtacggatcagcgctagtaccgatggacgaagcgctcgcccaagtcgccgtagacctgagcaaccggccgcaccttgagatgcgcggtgcatttccgcaagcgaaagtcggaacgtttgataccgagctggtacacgaattcctatggaaactggcgctggaagcgagaatgaatctgcacgtcatcgttcattacggaacgaatacccatcatatgatagaagccgtgtttaaggcgcttggcagagcgcttgatgaagcgtcatccattgatccgcgcgtcaagggtgtgccgtctacgaaaggaatgctgtaaatgatcggtgtaattgattacggtatgggcaatttattcagcgtgtcgaaggcgctggaacgcgtcggtgtcccgtatgtcgtatcagaccggccggaagagcttgaaaaagcggatgcttttattctccccggtgtcggatcattcagtgacgccatggacaatttacgcagcgcgaagcttgatcaattcatacaccgtatggttgacgagggtaagctgctcctcggcatctgcctcggcatgcagctcattttcgaagaaagcaccgaaaacggctctgcaaaaggactcggtttattagccggaaaagctgtgagactcaaagacagagatgccgaaggaaacaagctgaaggtgccgcatatgggctggaaccggctgacgtttcaccaaacgtctcctttgctttcggaagcggaagaaggcttcgtttactttgtccattcctattatatagacgggatggaagacggcgatcttctggcaagcgctgagtacggcgttcgtgttccggcggtcgtcgggaaacgcaatgtcttcggtgcacagtttcacccggaaaaaagcggtacggccggaatggcgatcttaacgcaatttacaaaaatggcagcggaacagaaggtgaagaaatgaacgcttttacattatatccggcaatcgatatgagaaacggcaaatgcgtccgcctcatccaaggcgattacggcaaggaaacgatatacggtgactctcctttagacatggcggcgcaatttgcacaagaaggcgccgaatggattcatctcgtggatcttgacggcgcgaaagcaggcaggaaagtaaacgacaggcatgttcttgacattgcgcggcagcttgatgtcaaagtcgagatcggcggcgggatccgttctgaagcggatgtgtacggttatttatcacaagatgttgatcgcgttattctcggcagctcggctgtttccgatccggcatttgtgaagagcatgctgaaacaatacggcggcaaaatcgcgatcggtcttgatgcaaggaacggatatgtctcgacggaaggctggctggaaacatcctcggtaagggcggccgatctgggccgtgaattggcgaaggaaggagcggaaaccttcattttcacggatattgcaactgacggcatgctgtcaggaccgaacatcgaaagcaccgttcagctcgcaaaagcaacgggaaaaaccgtcatcgcttcaggcggagtcagctcagtcgccgacctcaaagcactggcccgcttcaaagacgccggcgtatcgggagcgattatcggaaaagcgctgtatacaaaacaatttacattggctgaagcgctcagcggggtgaaggacgcatgatcacgaaacgaatcattccgtgtctcgatgtgaaagaaggccgcgtcgttaaaggcattcaatttctcgggctgaaagatgcgggcgatcctgtcgagctggccgaagcttacgacagggagggcgctgacgaacttgtttttctcgacatttccgcctctcacgaaggccgcaagacgatgacagacgtcgtagaacaagttgcggcaaaactggcgattccgtttacagtcggcggcggaatcaatcaattaagcgatatgaaacgaatgcttcgcgccggcgctgataaagtatccgttaatacagcggccgtcctccgccccgagctgattacggaaggagcggattttttcggctcgcaatgcatcgtcgcggcgattgacgcaaagtatgatgaagattcggattgctataaagtgtacacacacggcggcagaaagaaaaccgagtgggaagtcacggcctgggcaaaagaagccgtcagccggggagcgggtgaaatcctgctgacaagcatggacgcagacggtgagaaaacaggctttaatcatacgctcacacagcttgtctcacgtgcagtcccggtgcccgtcattgcgtcagggggagccggcagcgcgcgccatatgcttgaagccttcacgatcggtgaagcggacgccgcgcttgcagcttccattttccattacaaagagacatctataaaagaagtgaaagattatatgaagaaacacggggtgaatgtgagatgaaacgggcagatgaactgcggtttgacgaggccggactgattcccgccatcgtgcaggatgcggcaagcaaagaagtactgacactggcttatatgaatcgtgaatcctacgaaaaaacgatagaaacgaaagaaacctggttttacagccgttcacgcggggagctgtggcataaaggagcgacgtcggggaatacccaaaaggtgaaagccatccgctatgattgcgatcaagatgctcttgtcgtgcttgcggagccttcaggacccgcatgccataagggaagctacagctgcttttctccggaaaaagcggatgcgcaggatcgtttcggcatcttaaatgaactggaaagcgtaatcgccaaacggcaggcggagatgcctgacggagcctacacaacgtatctgtttcgggaaggcgtcgataaaatcctcaaaaaagtcggcgaagaagccgcagaggttattatcgccgcgaaaaaccgggaccatgaagaattaaaatgggaagcggcggatttgctgtatcatttgctcgttcttctgcgtgagcagtcgcttcctttggacgacgtgcttgacgtccttgcgaaacgccattcagcatctgagtaaaacaaacctcacggagagatccgtgaggtttttaatctgtcaaacttaaacattcaattaaatattccttatttccgcaaccggaggcagatgaatttgataatattgactaatagagtttattttggtttttatcaaaaatatactttttgttcatattccgttcatgcacatccgttatagtataaacagtgatataggaggaaaacttatgccgaataaacaaccaaaacctaaagggaaattcagctcattcttttcattagtcaaaaaaacaaaaccatcatacggtatgctggccttcgcgctgtctctcagtattgtgacaacgctcgtcagcctgctgattccgctgttgacaaagcagctcgttgacggcttttccatgtcgtcgctgtcaggcgtgcaaatcggaatcatcgcagccgtgtttatcgtacaggccgcattaagcgcctacgccacctacgccctgaactacagcggccagaaaatcatctcgggcctgcgtgatttgttgtggcagaaattaattaaactgcccgtctcttattttgacaaaaacgccacgggagaaacgatcagccgtgtcaccaatgacacaatggtggtaaaagagctgatcacaaacaatatcagcggatttattaccggaatcatctccgttatcgggtcactgacgatcttatttttcatgaactggaagctcacattgctcgtgctgatcgtcgtgccgctggctgcggtgattttagtgccgatcggccggaaaatgtttaaaatttctcgggaaacacaggatgaaacggcgagattcaccggattattaaaccacatcctcccggaaatcaggcttgtaaaagcgtcaaacgctgaagaagcggaatacggacgcggaaaagcaggcatcatggcactctttaaactcgggctgcgtgaagcgaaggtgcagtcgctcgtaggtccgcttattacacttgtattaatggcggcgctggtcgctgtcatcgggtacggcgggatgcaggtgtcatccggtgaattgacagccggcgcactcgttgcctttatcctgtatttgtttcagatcattatgccgatgggccagatcacttcatttttcacacagcttcaaaaatccgtcggcgcaacggaacggatgattcatattcttgcagaaaaagaagaagatatccaaaccggaaaagccattgaaaacgcagatcagccgattaagcttgaacaagtctcattcggctacaaaacagatcaaaccatcttaaaagacattacggctacgattgaagccggcaaagtcaccgcgatcgtcggaccgagcggcggcggaaaaacaacgttatttaagctgcttgaacgattctacaatccgactgcgggcagcatcctgctcggaaatgaaccgattgatgcgtattcccttgagtcatggcgggagcatatcggctacgtgtcgcaagaaagcccgttaatgtcaggcaccatccgcgacaatatctgctacggattaaaacgcgaggtgaccgatgaggaactgaggcaagcggctgacatggcctacgctctgcaatttattgaagacttaccgaagaaatttgaaacagaggtcggtgagcggggaattatgctgtcaggcggacagcgccagcgcatcgccattgccagagcgctccttcgcaacccgagcattctgatgcttgatgaagcgacatcaagtctggacagccaatctgaaaaatgggtgcagcaggcgctggaagttctaatgaaaggccgcaccaccatcgtgattgcccaccgtttatccacggttgtggatgcagatcagcttctctttgtcgaacagggtgaaatcaccggacggggcacacaccatgaattaatggcatcccattcgctgtaccgcgattttgcggagcagcagctgaagctgaatgccgacttagaaaacaaagctgtgtaaagcaagactttatgaatcaaaagcagctgaaaaagctgctttttattttgcagccggagtcctgttcttacgggtgtacggtcggtaacgatgaagagccaagccataagcgtgtatgccggtacaggagacaatgaaaaaattcggtttatagacatcatgtcgattcatgaaaagaaaaaagcagaaggagggattttcatggctgtcatattggttgcggatgatgaccgccatatccgtgagcttgtccgccttatgatggagcagagcggttttgacgtcgcagaagcggaagacggggaagcggcggtgcggctgatcgaatcagcacctatagatctcatcatactggatgtgatgatgccgaaaatggacgggtttgaagtcagtgaagccgtccgcagctttacggacattccgattttgatgctgacggcaaaaggcgaaacgctggacaaagttcaaggttttacttccggagcggatgattatctcgtcaaaccgtttgagccgcttgagctggaagcaagggtcaaagcattgctgaaacggtaccggatcaccgctgaaaaactgctgaccatcggaacggtcacattagataagcaatcccgcactgtaacgcgcggcggcggagcgggattgacattgccccggcgggaatttgagcttttatttaagctcgccggttatccgaataagacgttttcaagagaacaattaatagaagatatttggggctttgattatgaaggtgacgagcgtaccgttgatgtgcatattaaaaggctgagagaacggtttccggaaaaagactatccgtttgccatccatacggtgcgggggctcgggtatcggtttgtggtgacaggatgaaacggatcttcagaacggctggaaaaatcatcatccttctcaccgtcaccgcattcttatggctggcggctcacctgattgttcagggattcggtctcatatggccgattttgcttgtgccgtacgccgagcagattctgacgctttggcttgttttcggcctgctgttcgtaacaatgtttattttttcaaagtcagcacgtgaaaggcatcatgcgatctgggattcgctgaccgccacgatcaagcaaatgtcgagcggcaacttcacagcggccgcttcccggaaaatggagaagattgagcggaaccatcccgtgacgaaattggctgatgaactgtcgacactcgccgcggaactgagtgaaatggaaaaactgaaacaagaatttatttcgaacgtttcccatgaaatccaaaccccgctcacttcattaaagggctacgcgcatcttctgaaaaaaccggatttatcatatgaggagcgggggcgctacttacacatcatcgaaacagaaacagaacgattatcaaaaatcagtgaaaatctgctgaagctcactgcgctcgaacgccaaaccgaaccgatacaaaaaaaaccgttccgcattgacaaacagctgcggcgcaccatattgacctgtgagcctgaatggtccgccaaacagattgagtttctcattgatttacaggagtcgtatgtgtacggagatgaagcgctgctcagccaagtatggatgaatctgattcacaatgccgtaaaatttaccggtgaaggcggccgcatttccgttaaaattgcagatctgccgggagcggcggctgtcgaaatcgccgacgacggaatcggaatggagcctgaacaggcggagcgtgtatttgaacggttttataaagcggacaaggcgagaaacgaaggaggaagcgggctcggcctgtccatcgcccaaaaaatcgcagagctgcacggcggttcgatagaggttgagagcaagcggggcgaaggaacccttttccgcgtcattcttccagccgagcctcgtgaaaaaaacagctaaaatctggtcgaaccagccagtaaaaaacgaagtcgatcctgtcttttgaactattgaggtgaaaccgttttatggtatactactgacggtaatacgtataaaacggaggatatttgtgggaaaacacacttctgaacagaaaaagcacgcgcaaattgtccagctgcttcaggatggacaatatttttttcataaaggcttaaaagcatataaagagcggaatttaaagcgggccagcaaactgattcagcgggccgtccacctcgagccgaatgattccgaaatgctgtcccggctggccgtcatttattctgaaatgggccactaccagcagtcaaatgagctgttcgactttattttggtgaacctgaaagaagaaatgcccgagtgtcattactttaaagcgaataatttcgcgcatttggggctctttcaggaagcatacaaagaagcggcggcttattcagatgccgatccggacggtgaattcagcgaagaaattgaaaatctgatggagctattggatttcggcgaagcgggtgaaaacgaatcgctctatgaccaggatgaactgctgatcaggcaggatcgggcaaaaacgcttcttgagagcggccagcttcatgaagcggttgtcatgcttgaagagattacggccgattaccccgagctttggtctgcatacaacaacctggcgctcgcttacttttactcaggcaatgtcacaaaagcgaaacaaacggtattcgaagtgcttgagaaaaatgaaggcaatctccatgccctgtgcaacctccttgtattctgctattacgagagggaagatgaaaaagtcggagaattgagcggaaaactcgccaatgtgtatccgattttattcgaacagcgctataagctgggggcgacgcttgcgcttgtcggcagacatgatctcggttataaatggctccgttctctttacaaaagcgggtttgaaggcgacgaaacgttttattactggcttgccgcttcagcctacgggacaggccgcacagaatttgcggaaaccatttggaaaaaggccgaagccgaatttcccgaatcagatcggcccgcgccttgggcggagcggcaggaaccgctgcctgcttcacttgaacagcggcttgccgcctattatatcagcagcgctgaaggagagcggaaccagcttgaaaaagttctgacggcaaaacgcgccgtttcaccgtttgaacaagatttcgtcagactgctgctttccggtgaaaaaggcgtttcaggcgtctccggtgatgcgctgttcacgtatcggacggtcaagcttctggagaaagcggaagccgacagtttaaaaactgacgtcatgagctgctgggtttttcacgtcattcagcacatccgcgccgccgctgccgtacagaatgagcgggcatgggccgcagccatcgcatatgtatggaaagaagcaaacggcgaaaaaacgacgaaaaaagaaacggccgccgtttacggtataaccccggcaacactttcgaaatacatcagacaaatagatgatatattagaataaaaccgattctttctatataaagagtcggttctttttttatcagaaaggggcaaaacagaactttaccgccgaaaaaagaggtattcatacgtatttttttgcttttcgaatcgaaaccaggccgtaatcaccgtttattttgcaaaatatgagatttgcaatcacattgaaatataactgtaataaaaattgtcgaaacatgatggtataatgagtctcgtacataagagattagtttattttacatgtgctgtataatctataccaatttaaaagatttaaagattcatacataaaaatcatcagcctcacgggtatgtgagggagcgtaactttgatgttcataatagaattccaaatgagaacaggtttaaagtaaaagggaggaaagaaaaagtgaaaaagagtttattaacacttggtttggcttccgtcatcgggacaagcagttttttgatcccgtttacaaaaactgcatcggcggaaacattagacagcaaaaaagcaaaaattgaaagcaagcaatctgaggtggcttcaagccttgaagcaaaagaaagagaattgtctaagcttcaggacaagcaggctaagattgaaaaagaactgaaagacattaacgctaaagcgttggatacaagcaataaaatcgaagataaaaaagctgaaaacgaaaaaacgaaaaagcagatcgctgatttgaaaaaagaaattaaagaaacagaagcgcgtattgaaaaacgcaatgaaatcctgaaaaaacgcgttcgttctttacaggaaaacggcggttctcaaggatacatagatgttcttttaggggcgacaagcttcggagacttcatttcccgtgcgactgcggtatcttctatcgttgatgcggataaagagctgatcaaacagcaggagcaggataaagcgaaactcgaagacgcagaagctgaacttaacgtgaagctgaaaaaagttcaagatgatcttgcgaaactcgagtctatgcaaaaagacctgaacaaacagcttgatcagaaagacaagcttttcgacgaagcgaaaaacggtcagaaaaaagcggcttccgctatctctgatctgaaaaaagaagcatcaaagcttgcaaacgaaaaagctgacactgaaaaagaacagaagcgcattaaagctgagcaggctgcagcggctgccctgatcaaaaaacaggaagaagcgcaaaaagcttctgaagaccaaaaccaaaaagatgacagccagccggcaccggcggttaaaactgtgaaaaaagcggctgtttcaacatcatctgattcatctgacagctcaagcaaaccgaagagcacttcaggcggatcatctcataacagcggcggttcagatgattctgacggcggatctgttatttcaaattcaggcggtattgaaggcgcgatcagcgtaggatcaagccttgtgggtcaatccccgtacaaattcggcggcggacgcactcaatctgatattaacaaccgtatttttgactgctcttcattcgtacgctgggcttatgctaacgcaggcgttaatctcggacctgcaagcggcacaaacacagatacattaatcggaagaggtaaggcagtaagcgcgtctgacatgaaacgcggagacttagtattcttcaacacgtataaaacaaacggccacgtcggcatctacttaggtaacggaacgttcctgaacgataatacatcacacggtgtatccattgattctatgagcaacccttactggaagaaagcattcaacggcaatgtaagacgtgtcgtggaataatgaataagacaagggccttctatcccggaaggctctttctttatttgtatacccgctcaggagctgcctaatcacggtttttcagaaaaatgagcaaaaaaatagcgaattgccttcagatttaataggatatgggtaaggaatacgattgatggggattcttagtcatatagggtgcgccccatttcgaaaaggagtgaatcatggtgtcagaagaaaaaatttatgatgtgatcattatcggcgcgggtccggcggggatgaccgctgctgtttacacatcacgagcgaacttatccacattaatgatcgaaagaggaattccgggcggccagatggccaacacggaggatgttgaaaactatccgggttttgaaagcattctcggccctgaactttctaataaaatgtttgaacatgcgaaaaaattcggtgcggaatatgcgtacggcgatattaaagaaatcgttgacggcaaagaatataaaacggtcaaagccggttcaaaagaatataaagcgcgtgccatcgtcatttctgccggagcggaatacaaaaagatcggtgttcccggcgaaaaagaactgggcggccgcggcgtatcgtactgcgcggtttgtgacggcgcgttctttaaaaataaagagcttgtcgttgtcggcggcggagactccgccgttgaagaaggcgtctatctgacacgcttcgcttcaaaagtcaccatcgttcacagacgtgacaaattgcgtgcgcaaagcattcttcaggcgcgtgcctttgacaatgagaaaattgacttcaaatggaacaaaaccgtaaaagaaatccatgaggaaaacggaaaagtcggcagacttactcttgtggataccgtgacgggagaagaagaagaattcaaagctgacggcgtctttatttatatcggtatgcttccgctttctaaaccgttcgaaaacttgggcatcacaaatgaagaaggctacattgaaacaaacgctcaaatggaaacaaaagttccaggcattttcgccgcgggagacatccgtgaaaaaacgctccgccagatcgtaacggcgacaggcgacggaagtattgcggctcaaagcgttcagcattatgtggaagagcttgaggaaacgctcaaaaccgttaaataatcactgtaatgttcagtttttgaatcgttactgtgttttaattacgctgtaacacgggtgaaacactgatgtcttaagatgaatgtagtaattgaccccctttttaatgaatacactttggcacggattccagtatccgtgccctttttttgcgattttctgttttctgtcaaataaaagaaaaggatgtcggtgtctctgcattgtgagagacatgccgaaacggtataatgaagagacgatgatttgttgagaaggttaggtgacgtacttgtgcaaagagtgacaaattgtgtgctgcagacagatgatcaggttctccttctccaaaagccgagacggggctggtgggtcgcgcccggcgggaagatggaaagcggcgaatccgtcagagattccgtcatcagagagtacagagaagagacgggcatttatatactaaatccgcagttaaaaggcgtgtttacctttattattaaggaacaggaacaaatcgtgtcagagtggatgatgtttactttcgtcgccgactcgtacacggggcgaaatgtcgctgaatcagaggaaggcgttctgaagtggcatgacgtaaaagatatccacagccttccgatggcccccggagacgggcatatccttgattttatgatcaagggccaagggcttttgcacggcacctttacgtatacgccggacttcgagctgctcagctatcgtttagatccgcagcttatcaaataaaagaaagaccgcaggggggagaaagatgagtatgaatgaaaaccatgatattcagctcgtcatcattacgggaatgtctggagcggggaaaaccgtcgccattcaaagctttgaggatctcggctatttttgcgtcgacaatctgccgccttccttgctgccgaaatttttggagctgatgaaagaatcaagttcaaaaatgagcaaggtcgcgcttgtcatggatctgcggggacgtgaattttttgacaggctgattgaggcgctggatgaaatggcggaaaatccgtggattacaccgcgcattctctttttagacgctaaggattccatccttgtgacgagatacaaagaaacgaggcgttctcacccgctggccgctaccgggcttcctctcgaaggaatcgcgctggaacgccagctgcttgaagaattgaaagggcgctctcagctgatctatgacacatcggatatgaaaccgcgtgatctgcgtgaaaaaatcgtggctcatttcgccacgaaccaaggtgaaacatttacagtgaacgtaatgtcattcgggttcaaatacgggcttccgatagatgccgacctcgtgtttgatgtaaggtttctgccgaatccgttctacattgaaagcatgaggccgcttacggggaaagatgaggaagtgtcatcctatgtgatgaagtggaacgaaacacaaaagtttattgaaaagcttgttgatctgctcggctttatgcttccgtcttataagcgggaaggtaaaagccagcttgtcatcgcgatcggctgtacgggcggccagcaccgctccgtcacgctcgctgaatatttggctgactattttaaaaaagatttctatactcatgtcactcaccgggacattgaaaagagaagccggaaatgaataagaagccgaaaatcgcaatcttcggcggcggaacgggtctgtccgtgctgcttcgggggttaaagcataagcccgttgatattacggcgattgtgacagttgctgatgacggcggaagttcaggccgtctgcgggatgaacttcaaattccgccgccgggtgacatccgtaacgtactggctgctttgtcagatgttgagccgctcgttgaaaatctgtttcagcaccgtttcaacaaaggaagcgacttaaccggacattcgctcggcaatttgattttggcagcgatgacaaatataaccggtgatttctttcacgctgtcaccgaaatgagcaaggtgctgaatgtccgcggcagagtgctgccggctgccaacaccagtgtcgttcttcacgctgaaatggaggacgggcaggtcgtctccggagaatcgacaatcccttcttacggccagcggattaaacgggtgtttcttacgcctgaaaaaattgatccgctcccggaaacgattgacgtcatccgtcaggccgatttaatcattatcggtccgggaagcctgtacacaagcattcttccgaatctgctcgtaccgaaaatcggagaggaagtcgtcaaggctgcggccaaaaaagtatatatatgcaacgtcatgacgcagcccggagagacgctgcaatacagtgcggccgaccatgtcaaggcgctgaacgatcatatggagcagccgtttatcgacacgatcttaatcaacaatgaggagatccctgacgaaatcaaaagcaaatatgcgaaagagctggcccggcccgtcgacttcaatgttgaaaagctgaaatccatggggcttgaggtcatcagggatcagattatcacgtataaaaatggcgtaatccgtcacgatacacataaagtggcttctcttcttgtcgatttattaagggactagaggccttttgaaatgaggtggctaatatgtcatttgcatcggaaacaaaaaaagaactgacgaacctggaagtgaaggactgctgcgccaaggcggagctgtccgcgctgattcggatgaacggttcactgtcattttcaaaccgccatctcgtgcttgacgttcaaaccgaaaatgcggcgattgcccgccgcatttatacattgctgaagaaacaatatgatgtatcggtcgaactgttagtcagaaaaaaaatgcggctgaaaaaaaacaatgtttatattgtgcgcttttctgaaaatgcaaagctgattttagaggaattgaaaatcctcggagagaactttgtatttgaacggaatatttctgaggaactggtggcgaaacgctgctgcaaacgttcttatatgagaggggcgtttttggcggggggatctgtgaataatcccgaaacatcgtcgtaccacttggaaatcttctcgctttataaggaacataacgattcattatgcgcgctgctgaatgaatttcatctgaacagcaaaacgcttgaacggaaaaaaggctatattacgtatttaaaagaggcggaaaaaatcactgaatttctgaatgtcatcggcgctcacaattcactgctgcgttttgaagatgtgcggattgtcagagacatgagaaactcagtgaaccgcctcgtcaattgtgaaacagcaaacttaaacaaaaccatcggggcttcgctcagacaggtggaaaatattaaatacattgatgaacggatcggtcttgaagcgctgccggaaaagcttcgcgaaattgcgcagctgcggattgattatcaggaggtcacgctgaaagaactgggggaaatggttgcaagcgggaaaatcagcaaatccggcatcaatcacaggctgagaaagctcgatgaaatcgcagaacagctgcgtacaggacaaagcatcactttgaaataaccgtacagaaaaggggagatcttatggttcaggggaaagtggaagtgcgtttaaagacgggattgcaggcgcgtcccgctgcattgtttgtacaggaggcaaatcgttttgcatcagatgtgtttcttgagaaaaacggcaagaaagtgaatgccaaaagcattatgggattaatgagtctggcggtcagcacggggacggaagtcactctgatcgctgaaggcgacgatgaaaaggaagcgctggaaaagttgtccgcttatgtgcaggaagaagtgtaaacactttgtaagggggacggaacgatgaatgagtttctgaaagattgttatcaaacgataggctgggaaaaggattccctcgatttcagcaacctgccggagtttttaaaggcgctcgcatatcggtttccgtttgaaaatcgcgcggttttgtccaaaaaagaatatgacgtcacgaaagaaggactgtggcggcacatggtgaaggaacctcatggcggcctttgttatgacttgaacggactgctttatttcatcctgaaagatgccggatttgatgtcaaattgatccgcggaacggtctggaaaaacggctgggcgctgcccggcacacatgcggccgtacttctttccgccggggggaatgagtacatcgctgatgcaggcttcggcctcaatctcgccatgcagcctgtgccgatgtcgggagacgagacggtatcagcggccggagcgttccgcgtgaggatagaagagacggaattcgggacatacctgcttgaaatgaacaaaggggacggctggcagacaggttacgcattttcgcttgaagaaatcgatgaaaaggacctcaagtctatgaaacaaacaatctttgaacatgaacgctctcctttcaacaaacgcctgcttgcttctaagcggacaccggaagggcacatggttctgtctgaacgcaatataacaataaaaaaacacgatggcacggcggagaacagcagaatagaccgatcagagtttgaagaaaaatttactgctcattttatatgaagctcgcaggttctctgcaaaaaaaacggcctccgcagggaagccgttttttgtatgtgtttatctcatttttgtaaaggttttataatgatctgtcgtcttataaatcagccagtcgcttgagtaaagaatccggtctgaatttctgaagcctgatgtatagttaatatccgcttcacgccacgtccgtccgcttttggcagggagtttgccttccctgtttgagaagatgtctccgccgatgcttttccccggagcgacgtctgcaagattcccctttgatgcaacccagccgagggcctgcgcttctgactttgtaatgtaattatcaggaagcttatgataggtctgaagataatccgcaaccccgtcaaacgtgttgataacctgtgcttcagtgtgcgccttgtgagaagatgtatccgtcttggcagccgtggaaaacagcatccccgccgcggagaacagcaccagcaaacaaacggaaatccacgataatcgttttttcaaagcaatacctcccatttttatcatgtgaagctgattccttttcattgtatcagcatcgagagaaaggaatagaaagaatttaaaaatagttcttttgatctagcaaaaaataaaccccggctgaaacggccgggatttttcatctcattgaaattccttcgtgaggtttttcggcgtttttccgtatacggcgtcaatcatgttttgtgcggcttgcttgaacatattcaaacggatttttgccgttgctgacccgatatgcggaagcaatgtgacgttttccagctgcaggagcggattgtcttcggcgatcggctctttttcaaacacatctaaaccggcgccttttatccagccctcctgcaatgcgcggatgagcgctttctcatcaaccgtctttccccgggaaatattgacgaaacatgccgtatctttcatcaatttaaattcccgctctcccatcatatgatacgtttcgtcagtaagcggcgtaattaacagcacaaagtctgatgttttcagcagtgtatctaagtcggcatatgtaaccccgagttccttctcagcgtccggttttctgctgcgattataatacagcacgtccatatcgaagccgaattttgcccgtttggcagcttgttcaccgattctgcccatgccgataattcctaatgtctgatggtggacatccataccgaaaagagattcttcctcaacggttccccatttgccggcgcggacgaatcgatccaattcggcaacccgtctggcggaagacaggattaatgaaaaagccagatcagcgacagtgtcatctaaggtgtacggcgtatgcgtgccgacaaccccgcgtcttttcatttcttcaatattaaaattatcatagccgacagaattattgctgacgaccttcagcttcggcgcgtgatccagtaaatcactgtcaatcgccgttccggatgtcagcagcccttcagcatctttcattttttcgtacagttcttcttttggaatggtatcttctttccagatgtcataccggcaatgctcgcctatcatttgttcgacttccggcggtatcgatttcgcgatgaatacatagggtttcaacgggcttctcctcctttgtctttcttctctattttattatataagagaagcggtaacgtgagaaatattcaaacgcatcacgataaatttctggttcttttgaacttaaaatgaaagaaaaagaaatgtacatgcttggtttctccaaacaataacagaatccgcctatatttctgaaggcaaaatgagcggaaccgctgttttcaaaagctttataggttggtgtaaagataaattttattatttttgaaagatataaatgaacataatctgaatttacagtcaaattatcgtgtctttttttgaaagcgcttttgaggcctttttctgtgctataattccttactgtaagctgggtaagaaggcttgcaatacaatcggatgggagatgaatagaaaaatggtttctttatcaagcattttggagcacaaccagcagtttgtccaagaaaggaaatatgaaccttaccaaacgacaaaattcccgaaaaaaaagcttgtcatcgtatcctgcatggatacaaggctgacggagcttctgccgcaggcgatgggactcagaaacggcgatgccaaaatcataaaaaacgcgggagccattgtttctcacccatttggaagtgtcatgcggagcattttggttgccgtttatgaactgcaggcagaggaagtctgcatcataggtcaccgcgagtgcggaatgtcgggattaaatgcggcttccatattaaataaagcaaaagagcgcggcgtggaagacaaatgtctcagccttctgcagcatgcgggagtcgatttggaaacatggctgaccggctttcacagcgtcgaagaaagcgtggcccacagcgtgaatatggtcaggcatcatccgctcttgcctgaagaagtgccggtgcacgggctggtgattgatccggggacggggacgttggatgttgtcgttgacggttatgaaacagtcaaaggaggatgcagctgacgatgcaatttaccggcagatatcagggatacaatttgcagaaatttcagaaagacctagtcgcgggaattgtggtcggaattgtagcgattccactgggaatggcctttgccatcgcctcgggggtcggtccggaatacgggctttacaccgttattgtggccggaattctgatttcgctgttgggcggctctaaatatcagatcggcgggcctacgggggcgtttgttcccattttgtttgccattgtgatgcagtatggttttgagaatttactcgtagccggttttatggcaggcgtcatgctcgtcctgtttggcgtatttaagctcggaaagattatgaaattcgtgccgaagccggtgatcgtcggatttacggccggaatcgcggtgctgattttctcggagcagattgcccattttctcggtctgcgcgatatccaaaagcatgaaagctttatcctcaacattgcggaaataggcaagaagatcggaacccttaatttatacagcatcctcatcgcgggaattgctttggccattttgctgttatcagccaggctgatgccgaagattccgggcgcgcttgtggcgctgcttgtctctacagccgcggcggtcgtgttttttcctgacaaaatggcgacaatcggttctgcttacggggaaatcccgcggcagcttccggctttccagcttcctgatttctcaatcgataacatgatcatgatgtttccgtcggctctgatcattgcgcttctcggcggacttgagtccatattatcggcgatggtcgcggacaatatgaaaggatcaaggcatgacagcaatagggagcttgtcgggcagggcatcgccaatatggcagcgccgcttttcggcggtataccggcaacgggagcgattgcgcggaccgcaacaaatattaaaaacggcgcagtttctccgatttccggtgttgtccacggagtcaccgtcctcctcgtcctgctcgtcttcgccccgcttgccgttcacgtaccgctggcaagcatggcgccggtattgatggttgtggcttggaacatgagtgagcggagggaagtcgccaatatgatgcggctgaaaaacactgattcattcgtactggcggcaacctttttgctgacggttctgtttgatttaatcatcggcgtttctgccggtctcgtgctcgcttttgttttctttatcagaaaaatgagcgaatcaacacgtatcaaaacaccgcatgccgctgtcaaatcggttaaaaatgattcgtccgtcagcacatattccattgaagggccgctgtttttcggttcaattgattcactggaaacatcgctgctggagaggcttcaggaaaagccgaagacgcttattctgctgatgaataatgtacattacatggatacctccgcagaagcggtgctggggaatgtgatgaaccggatcaaacggcataacgggagattgatgatcgtcggattgcaatcacagccgagagagctgatccggaagacggggctgtttcataaaatcgggaaacagcatttctttgagcatcaggacgagataacgggataaattcagatacggcctgtccatgaaaaagcggacaggccgtgtttttattcggtttcaaagcgcttgatcagtttttcctgatgggctttcatcgcatcttctaacgtgattccgtacttatcagcaaggatggccagatttccgaggacgtcacccatttcttcaatcagctcctgcctgcgttcagcctgggtcgcgtctttttcatccggccggtctctgccgatttcatatgctcttaccgcccgggcgagctcacccgcctcttccattaaaaaaccgattctgataaatggcccgtacgccgtccatcctcgtttttcataaaaatctttcgtccattgttctgcttcagccatctgcatgtgaaacactccttatgtcctgtatgattcttattgatattatcatatagagatgggacaatatatagtgtattttgatttattgatgtacatatatagatatggagatgaaaaaatgaaaaccatttgtgtatttgcggggtcaaacccgggggtaaatgaagagtacaaacgcaaagcggccgaactgggtgaatatatggcggagcagggaatcggccttgtttacggcggttcacgggtcggtctgatgggaaccgtcgccgacgcgttaatggcaggcggcggaaaagctgtcggcgtcatgccgagcggactgttcagcggagaggttgttcatcagaatctgacggagctgattgaagtcagcggcatgcatgagcggaaagcgaaaatgagtgaacttgccgatgggtacattgccatgcccggcggcttcggaacatatgaagagttatttgaagtgctatgctgggcgcaaatcggcattcatcaaaaaccgatcggactgtacaatgtgaacgggtattttgagccgatgatgaaaatggtcaagtacagcattcaggaaggattttcgaatgagtctcatttgaagctgatacacagttcctcccggccggatgagctgattgagcagatgaatcggtatacatacccgattttagataagaaatggcgggaattgtaagaaagaggtctgaaatatgtttcggcggttgcatctaaccattctgatggaaaattctccgcctatagaataccttttctttctggaaatcgttttctctttctcatgcgtatcacacctttctttatgataagacatatgtatgagaataagatgagaaagagaatgctgttggggttgaaagcagaacatccatttcctcagaggagatggatgttttgcggtttgcagactgtatgcgtttacaacttttgttgcacgaatgtttcctccgatatgaaatcatcctgctgcatcttttgtttttttgaactgattccaaatataccgactgtcagtgcacaaagaaaccagcagcctgtaaagaacaagaaaacacttaaaaatccgtagcctgaatacaggaaactgacgacaaaggggccggctacatttgcaagacgtcctacgccgtaagtgaggccatttccagatgccctggcttcaaccggatataattccggcgtataggcatatgcgatcgaactgaaagtacgctcaaacatatgcatgagaaatccgcatatgacaatgaccatcggcaaaggattgatgccataaaagaatccaagcgccataataattaacgataaaacagaaatggcccactttcgatccacacggtcagagatttgcgacgcaatgagagcgcccagcggggcaccgatcgttcccagagtgacgtatacgatagactcatccattgatacgccttcttttaccaaaagggtgggaacccacgtgccaaagccttgaattgcaatcgtggaagctgcccacatcgtcattaaaacaaaagttcttcctgccaaaggcttttgaaataacgtccgatatggaacggattttacagcggtttgtctgcttcgcagagccggagctggttcaggcagttcacccttttctttttctgcttttgcctccagttcaagcagaatgcggtgtgcttgttcgctttttcctttcgtgtccagccatttcggtgattcttccagttttctggcgatcagcggaaaaaaaataccgaccgcgccgaatagaaagataaaccgccagccgtaagaggcggacggcacgaccaatttagccacccagccggctgcaggaattccgcatatgccgattgtaatacagattgcctggtatttacccttagttgcggatgggaaaaattcgctgatatacgtacttgccacaatcgttgtggcgccgatacctaaactcgtaagaaatctaaaaacaccgagtatttctgggttccaagccagagaagagaggagggagaagaaagagaaaaaggttacaaccagaattaaaccttttttccttccgaaccggtctgaaaaccatcctccggcagaggcgccgataaacattccgaaataggagacagacgtaataaaagcgatggtatgagtagaaatgttccattcctttaaaagtgaaggcgccgcatatgaaaacgtatttaaatcgataaaatcaaaaaagtaagcgaatgaaaggataacgagcactgcttgatgggcccttgaaaaaggcagtctgtttaatcgattagacgcatttacattgatcatctcgtattcctccgtttatctttgacttgtctgaagactggtattaaccaatgtgattcagcgtattcaggttgtaactttgctttgtaaacacatagccttcagagatttttcttgctgtgcgtactactttaatcgttgttccatccggatcaacatctgcctcggtttctaaaatgccgcttggatgtcccaatcgaatcgttctgccatagaatgaaaattcagataatattgtatcctgcaatagcataccggcagtcgtacaaaccgcccctgtaatggctaaagcttgatgcggtttttgcatggacatcatacgaatgacaagatccatctcttctgcgtgtctctttatcccttttgtatcgatataatccgctggagatgagattaatgttagttttggtacggccggtgattttgcagcagcctcatgtctcggagcgaatctgcatttctcggctgcaatcgatcggatcatttcgagcttttccaatatatccggagtatattcatccggaagttctaagccggtaagccccgtgtcctctgcttttacaaagacaagcggattagcgtaatcaataatcgagaccgagatatttccatacggtgtatcgagaacatcaataggctgaccagtgggaaacagcttaccggtcaccgctccttcagcctggtgaaatgaaagataaataggagaagctgtacctggaaccccggggatagagcagtccccctggtaatgaaatgttccatttctgacttcaacttctgctacgatcactttttgagtgtttgtatttaacattctgacttttgtaaccggctcttcagcttgaacgagccctttctcaatagcataagggcctacggcagcagagatatttccgcaattgcctttgaagtcggtaaaatggtcagtcaaactgacctgagcaaacgtatactcaacatctgcatcctttctggcggatttcttaataatggctgccttgcttgtgagagaatggccgccgccgagaccgtcaatttgtctctcgtcagggctccccataatgtctaaaagaaaatcgctccataggtttgtatcgtctggcatgtctttttgatgaataaaaacgcctttgctggtgccgcctctcatgacggttacaggaactttttccatgctgtctcatccttacatcattttgtgtggataaaaaggtaccggtccctttggaaaatatcgtatgataaattaggattataagtaaaacatataatttttataaagttgaataaaaaacttttataataggaggaaattttatagcagaaaaatattttgggggatttcatatggatgaaaaggattggattgtgctcattacattattcgaagaaaaaaatatgacgaaggcggcagagcgattatatatgacacagccggcgttaagttatcggctcaaaaacctggaagcacaattcggagtgcgccttttttataaaagaaaaaaagggatggagttcacttcagaaggtgaacatctggttgattattcgaaagagatgctgcaggaattcagaagagtgaaggatgatatgctcaatatgagccatgaagtcagcggggttctcagattaggagtctcaagcaattttgctcagtataagctcccggcgattctaaaacggttttctgatcagtatccgtctgttcaattccacgtcaatacgggatggagtgcgaaggtgatggatttgcttcatcattcgggggtacaccttgggattatgaggggaaattatgattggcaaggggaaaaacaactgctaaatgaagagcggctgtaccttatttcaaaaactgaaatcaacagtgaggaccttcccaaattgccgatgatttattatcaaactgatgcttctttgaaaagtttgattcaaaaatggtggaataaccaatttactgaaccgcctttcattgcgatggaggtagacaggcaggaaacctgtaaagagatggtgaaaaacggtctcggttattctgttgtgccggaaatctgtcttcagccttctgatgaattatacacattggcgctatcctataaaaataacgagcctgtgatacgcgatacttggcttatgtataattcttcagcgttagaattatctgtcgtcaaagcattcattacttttttgaatgggaataaagcataaaaaaacctgcaagagacatcagctcttgcaggtttttttggcattacttctggtcttctgtattgcgtgtcagcactttatcgattaagccgtattctaaggcttcatcagctgatttgaagttgtcgcggtctgtatcgcgctcaatgacttcaagcggctggccggtacgttcagcaagcactttgtttaatttgtcgcgaagcaagagaatgcgttttgccgcgatttcaatttctgtcgcctgtccttgcgctccgccaagcggctggtgaatcataacttcactgttaggaagcgcgtaacgtttgcctttttctccggctgcaagtaaaaatgctcccatagaagcggccataccgatgcagatcgtggatactttcggtttaatgaactgcattgtatcatagattgccataccggcagtgattgatccgccagggctgttaatgtaaatggaaatatctttttcagggtcttccgcttcaaggaataaaagctgtgacacgatggagttcgcaacgttgtcatcaatcgcagatccaagcatgataatacggtccttcaaaagacgggagtaaatgtcataagctctttctccgcggttcgtttgttcaatgactgtaggtattaaattcataatgctcctccttcaccttttaggtaagtatgtatttacatgatacatttttggtcaataaaggtcaaacaaaacgctgaccaaaatgccaaccttttcttctaacaccatttttcccataaaacaaaaagttcaaacagcaaagtggaaatgaggatgatcagcgccggagccttgagaaaatgatatggccggagcgctcaaaatagaccgcaatcgcgtcgctacgtacggctgaagggtctgactacgttgtccgcccttccaaaagccgtaccggcaaatacgtttccagcggcaaatcatcaaattcgccttcaatttcttttgctaaaatctcgatggctgttttggaaatcaattcaatcggctgctggatggttgccaagtccggcagaaccgattgaacggtttcagtgccgtcataaccgatcacttttaattgattcgggatgtctattccccgttttttggcctcggtcatcactgcagccgccatgatatcatcgctggcaaaaattccgtcggtgtcgggctgttcatcgaataatgttgaaataatgtcatggtaatgctgataaaagggtacttcatatgtaataggcttccgtccgtgttcatgcatgacgtcttcgtatgcttttcttctgaggtttgccggtgtttcgagttcaatcgggccgttgatatggacgatgtgccggcaccctttttcaatcagcagttctgccgccttttttccgccgtcatagttgtctgagccgacgacgggaatcgtgtccgataagtaatgatcaatggcgacaatcggcagattttgcttgtgataattgagaattccccggttgtaagtcacggcgatcacgccgtccacttggtttcttatcagcatctccaaatatttttcttccttatcctttcgatgtaaactgttgcaaagcagcagtttgtagcccatggacgtacaaatgctttcaatatgaaaggcgagttcgccgaaaaacggattgctggagtttgggatgataagccctattaaattggttcgttttcggaataaagagcgggccagatcgtttggaaagtaattgatttcttccatcgccttgtacactttttcttttgttttttcgctgatatagccgcggttatttaatacccgcgaaacggttgtagatgaaactcccgctattttcgcaacatcatgaatgttaggcttcattcccgtgccctcctgcttactgaaatggcttacaatttccgtcacgcacttattttagagaatcaggctgacatgtgcaaggacattccgtgtttctgttttcatataaagagggtgcgttttgtttgattaaaataatcagaaaattgtatgtcaaccgattgacatatggaaccggttgacatacaattctttttgaaagcgctttattctcagagtgaagggaagtgacgggtatggagagatggctggcggcaataaagtgaaagaatcgagcagcgatggaaagtaagcgcttactcagagatcgcatgtatatgatgaaaatgaagaaggaagtatgcggctctaaaacggctattaaaaggtcctattaaaggagcggtgcaaatgaaaagctcaaaaagtctgtattggaaactgagtgcttatttcttctttttcttttttacttggtcttccagctattctttatttgcgatttggttagggcaggaaatcaatttaaacggatcagcgacaggcattatcttttctgtaaacgccgtatttggcctctgcatgcagcctctttacggttttatctctgacaaattggggctgaagaaaaagatattgtttatgatcagctgtcttctcatattcacgggtccgttttatatcttcgtctatgggccgcttttacaatacaacgtctttcttggcgccgttgtcggaggcttatatttgggagccgcttttttggcggggataggcgcgattgaaacgtacattgaaaaggtcagccgaaaatatgatttcgagtatggtaaatcaagaatgtggggctcgctgggctgggcggcggctgcattttttgcagggcagcttttcaatatcaatcccaatatcaacttctggatcgcgtctgtttcagccgtcatattaacggccattatcatgtctgtgaaaatagaaatgactgatcatgagaaaaacagagcggattcggtccggttaaaagacgtggggcggctctttttactaagagatttctggttttttatgctgtacattatcggggtgacttgcatttacggcgtatatgatcagcagttcccgatctactatgcgtctttgtttccttcagtgtcgacgggtaaccaagtattcggctatctgaattcattccaggtgtttttggaggccggcatgatgtttcttgcgccttttatcgtcaataagttcggggcgaaaaacagtttgattttagcggggtttttaatggctttccgcatcgtcgggtccggaattgcagttgagcctgtaggcatttcatcaatgaaactcatccacgcactggaattgccgattatgctgatcgccgtttttaaatatttggctgccaattttgatacgcgtctgtcgtccgtcctttatctcatcggttttcaattcgcatctcaggcaggcgcgtcgattctgtcgccgcttgcgggaggattatatgacagtgcggggttccgtcaaacctatctcatcatgggaatcgtcgtcttcggttttaccgtcatctccatatttactttattgggcccgaaacaaaacagcaggcgtgtccagcgtctgcaaaaaatcggatagagaggatgttacaaatggatagaattcagcaggcggaagaagctctgaaggaagccgagggtaaagtgaaacaaagatatcgattggggtaccatattatgccccgggcgaattggatcaatgatccgaacgggcttattcagtttaaaggagaataccacgtcttttttcagcatcatccgtatgatgagcattgggggccgatgcattggggacatgtaaaaagtaaagatctcattcattgggagcacctgccggttgccttagctccgggcgatgcattcgaccaaagcggctgtttttcgggaagcgcggtcgatgatcatggaagattagccctcatctatacaggacataatataattgatcaaaagaaagacctattctatcaaactcaaaatatcgctgtcagccaagatggaatcgtgtttgaaaagcttcaggaaaaccctgttattgcggaaccgccggaagacagcgcccgtcatttccgcgatccgaaagtatggaagcatcgcgatgtttggtatatggtcatcggcaactcttcaaaagaaaacgtcggacgggtcgttttataccgttcacctgatttgagtgattgggaatacgcgggggttctcgcccaaagtgacggtaatctcggctatatgtgggaatgtcctgatttctttgaattaggcggcaagcatgtcctgctgatttcaccccaggggatcgaggcggacggtgattcatatcaaaatttacatcaaaccggttatttaatcggtgactatcataatgaaacaaacaaatttacacacggtgcttttaaagaactggatcacggccatgacttttacgccgtgcaaacattattagatgataaaggacgcagaattgctatcgggtggatggatatgtgggaatctgagatgccgacaaaagcggacggatggtgcggtgcattgactttgccgcgagaactgactttgcgtgatgatcataaacttttgatgaatcccgtggaagaaaccaagcagctgcggaaaatggaataccgggaatgtgccggacgatcgctttcagggagttacttggcaaagacgtccgaagacctgcttgaagtccgggccgtgtttgatgtgaacgattctgatgccgaaacggcaggttttaagattcgcggccttgatgaagaagaacttgtgctgacatacaatctaacggataaaaagctgacgcttgattgcaccaagatggggaaagcgaaagacggtgtgagaagggtgcagacggatacaaacggcaagctggcgctgcgtatctttattgacagatcctcgattgaagtattcgccaatcatggagaaacaacgatgacaagccgtatctatccgaatgaaggcagattggggattgagctgttttctgagaaaggcgccgtaaaggttgaggaattcacctattggacgttaaaggacatttggaaaaaaagctaaaacgggtgattactgctttttctgcagtgattgaaaatgaaccgagccgggggcagtccgcctgaaatgggttttttgtgaaaatcaatgccggtaaacgatgcaggattatgctgcatgaggacgctgcataatcctgttgtgcattatcaaaaaagagttgctttctgcgcgttcctttattataatataaaggtatctgattgaaaaaacgtgcgctcgtagctcagttggatagagcggtggtttccggtaccacgtctgtcgggggttcgaatccctccgagcgcgtctcagttaagaggataggaaaaacctcgcagatgataaatctgcgaggttttttattttatcttgttttgaaactgttaacgaatgtgtctctgttatgttcggttccggcaatcagccgcgcactttcactgatccgctgcgcgagagctttttgcgccttgccttcaaagctgttcaatagtgctgaatacacttcatataattcatctttcaacgtatccatttcgaatgtcggtttcagcgttcggcggactgtttcaagttttgtccccgctgcctgcgtcatccctgttttcagcatctgccgctgcagcattttcttcatcgggtcgtccttgtgttctaaaagttcgtctaatgtcggcattatgtatacacctctatcatcttaaccagtttgcgagcatctggtcttttttctgaaattcgtctgctattttatgtaagaatccgccgatctcttctaggtccgtgatcgccgcctgcaaagaatcaataaacgcctgctcagcctgagtgtcgtaaaaaatcgggcctttatcgtaggattgcgcaatatcttcaatggtattggtcacgtcctgtgcttgaagctgatcaaacaagccgtgtccgacttggccgtaaatttccgtttttagctcggcgattttttcatcgtgctcctgataggcgttctgcgcttcttttttcatcgtccgtaaatcctcagtcatggcctgcaccttttcagccagcttctttgcgtttttcggcgttacttttattgtatctgcgcttccgatcgcaccggccggcagaagagcgccgaggtttttgtcaaagactaattcatctccgttcggatttgtgatgcttccgtttcggtcaaatatgaaattcgcttcatttaagccgtgtgtatccggatttctcagaatgacggtagtgaagaaataagcgagattcttgccgatctgctcgttcaagttcccgccaagccgctgctttcggctgaactgtgagagcgaagggtttttcgtataaatcgttgtcccgttgtggcggtcatattcgttccaataacccgccccggccatgtcgtccggattgataattgaccggatgtatggatcgtatatgccgctgttgatttctttctgtgtttcttcatcgtgcagttttacgacggaagggctgttaaacgcgacggcgtacacatcattattcactgcgctgtattcggcctcagcgccgccgagtgaatggccggttgttgaaataatcgttgacgttccggcatactttttctttacgctgcgtaccagctgatcggcttgatcgatttgcgaagttttcgtcatcagcttatactttccggttgtgagcatggcgtcttgagagggcgttccgtgataggctccgagcgttttcgaggtatcctttgcgtctttttttacaatataatgtacttcttttttcggatcatttccgaaaacaatattgccgccgtccgcttttacgccgtcattgatcgggtcttttccgatatcggttcccgcaaaggcgacgaccacgttttcggggttttttgattttgtccattttccgttattcttcactgcttgtgctaatacaaccgcatcaagtcctgtattatcgtctgattttatttgatcgacgcaccagtaagtaggttttgaaatggaagaattaaagcgtatataatcgttcttctctaatttccttttaagatagtcatagttataagcacgttgactcatcctgtaatatgtttcatctgtcaggtttgaagtcctgattttcttgctcaagatatacagcacctttcttgtcatgtaaaatagggtagggaaagggatgattttttttgaaaaaataccttattattgttctagtgttaattataaccgttggagggttgattatgaagcatcaatatgatgggaaaaaggaagaaaatgctcttttcgaaaaagccaaaagtaaaatgaccgagtacttgcgtagtgagtataaggatatagagaaaatttcttatgatgattattttattgatccaaccggcggaattacagttgaggggtacctaaacggcgataaaactaaagaatttgacggcttatatgatcctgtaggagacaaaatagggagctcctctgtggatgcggaagaaaaatcttaagacgcctaaatgcacctgtcaccgaccattttttccagtccgcgagcttcatcatcactcatggaacggatgtttctgtgaaaaatatattattatgttcattatcttaatagcagccggaagttttataatgaagaatagtaatgataaaaatgctcaggctgaagagataaagattgctcaagaacgaatggagaaatttatcaaatcgaattatgaaggcatacataacgttacatttaaagataaatacgaaatagatccaatgggcgggatagaggtatttggctattacaacggtgatacatcgaataaattcgatggtatttacgataaggcaaatgacaagatcatggggcactcaatagacgctgtaagaaagaatgcagagataaagattgcgattactaagaagacgctcgtctggcgttttttgatatatgagtatacagcaaatgaaaaagacaagggtttcggcatgtgccgcccttgtctttttttattgaacactgaaaaacataaccggaacagctcattatttgacagtccattttaacagcgttacaattaaacatgtaaatagttacatgtttaaataaacataatatctcgggaggtgatacgtccttgaatgaaccttctttaaaaaagtcatttatgagtcagtgaaccgcatcattgatcccgagcacgtgtatttccgcactgtgcctgtgtttgaaacaagcagcgaggcatatcagcatctgcaggaccggctgtttatcggggctgcggtcagattgccggatgacattcggttagatatttatgaagttcaataataagatggagagtgagtcaacatggaaaactttatcggaagccatatgatttacacgtatgaaaacggctgggagtatgaaatctatattaaaaatgatcataccatcgactatcggattcatagcggaatggtgggcggccgctgggtgcgcgaccaggaagtgaatatcgtcaaactgacagaaggcgtatacaaagtgtcatggactgaaccgacaggcacagacgtttccttaaactttatgccgaatgaaaaacggatgcacggaattattttcttcccgaaatgggtgcatgagcatccggaaatcacggtgtgctaccaaaatgattacattgacgtgatgaaagagtcacgtgagaaatatgaaacgtatccgaaatatgtcgttcccgagtttgcggatattacgtatctcaacaatgcgggaatcaataacgaagcactgatttcagaagcgccgtacgaaggaatgaccgatgatatccgtgcgggaaaattaaaataagagaaaaaacccggcagcttggccgggttttttgtatccttttacgacagggttttggtcatgataaagtcgacttgcttatcatcccccatataaaaagagtgttctccagtttggacaaaccccattttttgataaaaggcgattgcattttcgtttttttcccatacgcccagccagattttctttttattgtgtgctgttgcgattttcacagcttcattcagcagatatttgccaagcccgtgtttctggtggttttttcttatataaattctctcaatctcaagagaatcttcacccattttttctgattgtgcttcgttcatgttgacttttacataccccgcaaggtcatcatgataataaacaaaatagaatttagaagacagattggataattcctttttcagctgttcagagcggaatgcattttccaaataagctttcatattttctggtgaattttgatccttaaatgtatcattgaatgtttcaatgcttatctcccggagctctgttatatcgttaaggctgcacttttttaattgaatactcatggtcatacagctcctttcttcatttatcatatcagctgattttttgttgtatttgcaatgaaaataccgtatagtaaacataccgtaattttgttgtatttgcaacataaaataagaaaatgaggacgataaagtgaaatatgttttttatgttttaggaatcatgatcttgacctttggtatttctgtcacgattcaatcagatcttggaacgtctccttttgatgcgcttattgtgggattatccgtccatgcagggcttaccgtgggaagctgggaaatcatcatcgctttcctgttaatttgctgtaattcaatgttaaaaagacaaagaccggaatttacagggatgattacggcgtttataacgggaatcgggattgatatgtggctttttttcctgcaccgaatcataacgcctgaaccatggtacggaaaggcgggctgttttgcaatcggtttagttgtgatagggataggaaccgcaacctatctgcacacaaatttcgccccgatcccggttgatcggttaacgttaattgtccgcgaattaaccgggagaagcatctttttttcaagaacggtcatttacttcatatttttcatactggccgtgatgctaaaaggtccggtaggcatcggaacgttattaacagtttgtttaggaggggtcattctccatttctttatgccgattaccggaagatggatagacggcatattaacagcatctccaaagcaggaagaaacgaaaacccggtagcgggggtttttacccgattctatcatttttcatttcatccgcatgttcaaggtataataaaaaagggggagggatttttatgagcggtcaaagaaagctcgttttttacggagctgtcagcgcagatggctatcttgcgcgggaaaatcactctttagattggttaatcggaactgaaggtgaagacggcaccgattatgaagctttctatgaatctgtcgatacgatcatcatgggcagaaaaacatacgaggacatattggttttattgcctgaggaatttccgtacaaaggtaaagaatgctatgtgttttcgcggacattgaccgggcgtactgaacatgtgcggtttgttcatgaagagcctgccgattttataaaagcattgaaacgccaagaaggcaagcggatttggattgtcggcgggagtgatctgctgcacccggttttggaggaaaaacttgtcgatgagtttatcattcagatcgcccccgttctgctcggacgcggaatttctttgttcaaacccggagaccgggagacaggactgaagctgactgatgtcaggcgttacaaacaatttgcggagttgcattatgaagtgagataaaatgaagtgtatgaaagaaacccagtaaaggttaccgggtttctttttcatgtctgtttttatgttttgaaatggtgtgggccggcccgcatgaaaatcctgcaatcatgataacaacccctatccacctcacggcatagaaatcagtgtcgcgcaggaagataaatgaaactaaggtcataagcgccccgattataacggcagctgtgccgataatacttgatttctccatataaaaactcctttatgaatgtttggttaacttattgggttagaatataacatatcaggggtaatgcggaaatggattttctgcgatgtctgaagtaagatgaaaacgaaacgccaagggagccggctcccttggcgttttttatgcttgaaacaggatgcggcgttttgctgaatcgggatcactttcgacagcggtatccgtgttgaaaagcaaagttttgcgtgaatcggtatcatattcaggccaattgaagtgagaggtgttcgggtttccggtttttgcaaaagcgagccatgcggattggatttgtttggaaagctgttctgcgtcatcaccgagcggttcttgcagcgtctttctcaaagaatcaaagtttccgaacacaaatggcaattccagagcgtgaacggctttatgaaacggcggtgtttcgccatgccaatcaaagcggtacatccagaccggtgcgtgctgcgactgtccttgtgcgaaagcgacagccggccgccagaaaatcagatccgtcatcatatcgatttgtccctttaatgaatgcggatataaatctgccgcttgctcagtgcagttctctccgagatgataatgcaaataatcttgctgctttttctcggaatgaatgtctgtatcaggggtgaaaaacaaatatgcttcatcacgattggttccgatgatcataggtatgccttctgcggccccgtctgctatggctttcacgggttccgcaggcaatgtggccggatcgatggcgggctgaaacaaaagctgaaaaatgttttgatctagtgagcgccgcactttatccgcagtcttaagcaggtcattaacggaaagctcctgcaattgatcagtgccggcttcatgaataaatgccgccgcgatgtcttttgccatgtccgccgggatcgtatgagaggcgccgctttctaaaatggctttatgaaacaggccttttgcgtcaggcattgccataagggaggcgatgctcatgccgcctgccgattcgccaaatatcgtgacgttatccgggtctcctccaaattcggagatattgtccctcacccagcgcagggcggcgatctgatcgagcagcccgatattggcggaatacgcgtcgtgaatagaagacaaatgtaaaaagccgaacggtccgagcctgtaattgagtgtcactacaatgacatctccgtcagcggcaagggcagatccgtcgtaaagcggttcgcttccggcacctaaataaaatgccccgccgtgtatccataccatgacaggctttttttcgccctctgaatcgggggcgaaaacattgaggtaaaggcaatcttcagattgaggcggtacatctccggaaaacgatatagacagcatatcatccggctgcggacaaaccggtccgaacgaatcggcatgttttacgccgtcccaaggtgcgggcggctccggcgctttaaatctgagctctccgacgggcggcttcgcgtacggtatgcccttccatgtgcgggcaccgcggccggcagttcctttcattgcgccggagcgggtttgaacggtaagttttgtcatgatttcatccccttttttcttttcattataaacagagatgaagacatgaagcgaataaaagccttttcatcagcatatcattagtaacgcttccgttctaaaaatgatctgacttcctgaacggacaagccgagttctttggcttcctgcatcagcgctttccattcctcaatgttggattcagtcagttttctgttgcggtagggtgcgggctccgggcgtttttcagtcagtttgttcgtaaaggtgaacagttcttctttcggcatgcccgactgcacggcctgcacaaggtggatgcgccactcatcttccgtgcctcccatgtgatgcagcatcgtttcggcatcaaaaagctccgtcagatcgacctgcagggtggcggatacttttttcagaaattggatggacggatttgagtgaaccccccgttctatcttgcttaaataagatttagagacacctgcttcaactgctagctgattaatagagtagccttttcttctgcggtataaacgaattattcttccaatcattgtgctgaattctcccctgtatactggcatttttttgttcattataagaaatttttcgttctttataaaatttaaaattataaggtaagtgcagtaaataagaggaaaatcatgataatgttctttaaaaagaaccaaatggcttaatttgaaattttcaaatttcgaccttttcttttataatccaatcattaacagaagggggcgtttaagcctgatgcaataaggatgaggctgtaattacatgaatgagaatatgagttttaaagaattatttgacattattaaacacagacttttactgatttttatcatgacagcagttgtaacgctggtgacgggatacatccaattccgggtgatttcgcccgtttatcaggcatcgacccaagtgctcattcatgaaacaagcggtgaaaaaaattcgaatctcagcgacgttcagctgaatcttcattacaacaatacgtttcaaacgataatgaaaagcccggtagtgcttgagaaagtgaagcagacgctgcatctttctgagacggcatccgctttaaaagcaaagatcacgacaagcagcgaaaccgattcagagatcattaccgtagcggtgcaggacgagaacccgaaacaggccgccgctatagcgaacacgctgatgaagacatttaaaaaagaagtccgtgacaggatgaatataaaaggcgtcattgttttgtctgaggcaaaagcatcggaaagcccgatggtcaaaccttcgcgcatccgaaatatcatgatggcgttcggtgcggctctcatggcgggtgtgacgcttgcgttttttctccactttcttgatgaaaccgttaaaagcgagcggcagctcagcgaaaaaacagacttgcctgttttaggggttgtgtatgacatcaaaaatcagcagacacggtctgatgaaaaacatttcggggagtgaggcgtttgggattcagaaaaaagaaatcaagaaggggactggctcaaatatccgttttacatcacaaatcattggtggctgaacaataccgcaccattcggacaaatattgagttctcctctgttcagacccatttgcgctctattctcgtcacttcttccgttccgggagaaggaaaatcattcagcgccgccaaccttgccgcggtatttgcgcagcaggaaaaaaaggtgctgctcgtcgatgcggatttacgaaaaccgacgatacacgagacctatcagcttgaaaatgtacaaggccttacgaatgtgttagtcggaaacgcttccctcggcgaaacggtgcaaaaaacgctgattgataacctttacgtcttaacgagcgggccgacgccgccgaatccggctgagcttttatcttcaaaggcgatgggagagctgattcaggagatgtacagccggtacagtctggttattttcgattcacctccgcttttggctgtggcggacggacagattttagcgaaccagacagatggaagcgttctcgtcgtcttgagcggaaaaacgaaaatggataccgtccaaaaggcgagagatgcgctccagcagtcaaaggcaaagcttttgggggcgctgctgaataaaaagaaaatcaaaaaaacagagcactactcatattgagcggtgcaggtgatgtctccttacctttatcaacggaggcactcggctctgctgtgggcggcgttttccgctgccttagatgctggtcgtcggtggcggggtgtgaggacgggttaaatgcccaattttatcttaagatgatgcattgttatcggcttagctgttatgtctgtttttacgaaaaccgtatcagctaaaccgataaatgaggaggggaaagattgacttaccggagaagactttcaatgatttttgcattggatacgtatctcgttttactttccgttgttataggatatcaattttttgaggattcttatcacttttatgactccggagcgttgctgctgactgccgtgagcatgctgatcagccatcatgtatgcgcttttatgtttcaccagtataagcaggtatggacgtacacgggaataggcgagctgcttgatctgctgaaggggatcacgctgtccgcagctgtgacagccgccgtccaatacggggtgttccacacgattttgttccggctgttggccgtcagctggatggttcagctattgttcatcggaggaagccggatgatttcacgggtgctgaaagaaacgatcggcaggaagcaaaatgactcttccagggcgctgatcatcggcgcaggtgcgggggggacgctgctcgtccgtcagcttacccagaaaaacgatctcggaatcatgcctgtggcttttattgatgatgatcagacgaagcataagctcgaaatcatgggcctgcccgtcatcggcggaaaagaaagcattatgccggcggtgcagaggctgagaatccaccatattatcattgccattccgtctctttgcacccatgagcttcagacgttatacaaagaatgtgtgcagacgggcgcccatattaaaatcatgccgcaatttgatgagatcctgctcggaacgcaggctgccggacacatcagagatgtaaaagccgaagatctgctcggcagaaagccggtcacccttgatacgagcaaaatttctgacagcatcaagggaaaaacgattctggtcacgggcgccggcggctcaatcggttctgagatctgccgccagatcagcgcgtttcttccgcgggaaatcgtccttctcggccacggggagaacagcattcattccgtacataccgagctgtccgcacgcttcggcaaagaggtgctctttcacgcggagatcgccgatattcaggacagagataaaatctttgctttgatgaaaaaatacgagccgcacgtcgtctatcatgcggctgcccataaacatgtgccgttaatggaacataatccggaagaagccgttaaaaacaacattatcggcacgaaaaatgtcgccgaagccgccgacatgtgcggaacggaaaccttcgtgctgatttcttctgacaaagcggtcaatccggccaatgtcatgggcgcgacgaaacggtttgcggaaatggtcatcatgaacctcggaaaggtcagccgcaccaaattcgccgccgtccgtttcggaaatgtgctcggaagccgcggcagcgtcattccgattttcaaaaagcagattgaaaaaggcggacccgtcaccgtcacgcacccggcgatgacaagatattttatgacgattcccgaagcgtcaagactcgtcattcaggcgggggcgcttgcaaaagggcggcagattttcgttctggatatgggagaacccgtcaaaatcgtcgatctggccaaaaacctgattcatttatcaggctatacgacagaacagattcccatcgaattctccggcatccgcccgggagaaaagatgtatgaagaattgctgaatcataatgaagtacatacggagcagatttttccgaaaatccatatcgggaaagcggtggacgggaattgggccgtgctcatccgttttatggaggaattcagccgtctgcctgaagaagagctgagaaaaaggctgtttgaggcgatcgaatcagtacatgaagaagcggccgcaggcgtgtgatgggaggacagaaagatgacgaaaaaagtattattctgcgccactgtcgattatcattttaaagcctttcatcttccgtattttcaatggtttcaggatatgggctgggaggtgcacgtcgcggcaggcggcaatatgaatcttccgttcgttgatgaaaagttttccattccgatccggcgctcgccgtttcatcccgaaaatctttctgtttacaggcggctgaaacggctcattcaggacaacggctacgacatgattcactgtcatacgccggtcggcggcgtgcttgcacgccttgctgcgagacaagctcgccaaaaagggacaaaggtgctgtacaccgcgcacggctttcacttctgcgacggagcgcccctgaaaaactggcttctttattacccgatcgaaaaatttctttcttcttatacggattgtctgattacgattaatgaagaggattacgaacgggccaagcaaatgaaaaaaacagcttgcggcgcgaaaaaaatacacggcatcggggtgaatacagacaggtttcgccctgtgagccgggaagagagtgaacgtctgagagaaaaacacggcttcggcgccggggaatttattctcgtataccccgctgaattaaacggcaataaaaaccaaggacttctcattgagactgcggcactgctgaagaaccgcatcccggagctgaaactcgtatttgcaggagaaggcgtgatggaagcgccgtacagaaaaaaggctgaatcactcggtgtatccgacatggtgcggttttacggtttttgccgcgatattcatgaactgattcagcttgccgatctgtctgtcgcctcaagcatccgtgaaggactcggcatgaatctgcttgaaggaatggctgccgaaaagccggccgttgccgcggacaacagggggcaccgtgagatcatcgaagacggcgtgaacggttttctcgtgccggccggggacagcgcggcatttgccgatcggattgaaaagctgtaccgctccccgtgtctgcgaaaagcaatggggcaaaaagggcgcagcacggcggaatgtttttctgaaacacgtacggtaaaggaaatggcgcacatttacgccggttatatggataaaaaggagaaaagcgtatgaatgcaggagcacaaccgaaaatttccgtcatcatgggaatttataattgcgaagagactttagcggagagtattgaatccatcctgagccaatcttataagaattgggaactgattatgtgtgatgacgcgtcaactgacggaacgtatcagattgcgcgccgttacgcggatcattacggcgaccggatcacgctgattcaaaataagacaaatcaacggcttgccgcttcgctgaaccgctgtctgacatacgcaacgggggattatatcgccaggcaggacggtgatgacatctccaacccgaggagactggaaaaacaggccgctttcttaaacaagcacgcccactatcaagtcgtaggcacggggatgctcgtatttgacgaattcggtgtaaggggcgcccggcttttgccgcccgtgccgaaaccgggaattatggcgaaaggcacaccgttctgccacggcaccattatgatgcgggctgaagcgtacaaagcgcttggcggctaccggtcagtcaggcggacgcggcggatggaggatatcgatttgtggctgcgcttttttgaagcgggtttccgggggtacaatctccaagaaacgctgtataaagtaagagaggacagtgatgcgtttaaaaggagatcgtttacgtattccattgataacgcggtcctcgtttttcaggcatgcagacggttgaagctgccgctttcccattacgcgtatatcgcaaaacctctcatccgcgccattacgccgcccgcggtcatgaaccgttatcataaaaacagggacatccgccaaaaagaagggcttgccgaacatgactgacaaaccgatgcgggtgctgcacatcttcagcgggatgaacaggggcggcgcagaaacgatgatgatgaatttgtaccggaagatggacagaacgaaggtgcagtttgattttttaacccataggaacgatccgtgcgcttatgatgaggaaattctcgctctcggcggacggcttttttatgtgccgagcatcggcagcacaaacccgattacatttgtgaaacaggtcaagcgggtgattcaggaaaaaggcccgtttgccgccgtgcacgcccataccgattttcagtcgggattcatcgcgcttgccgctcgtttagccggcgtcccggtgcggatctgccattcgcatagtacgtcgtggcgggggcgggcgtcgcggcttgccgggatgcagctgtttgttttcagacggctgatcacggcaaacgccacggcactgtgcgcctgcggagaagacgcgggccgtttcttattcgggaaagaaaaagacgtgcatcttttgccgaacggcattgatctcgacttatttgccggcgggtgcgcggacacagaagctgaaaaaaggaagcggggcattgcaggcggccgtttggtgatcggccatatcggccgctttacagaagaaaaaaaccacgaatttctgctccggctggccgctgatatgaaagagcggggcatcggcttacagctgattctcgccggagacggtccgcttcgcaccgacatggaaaatctggcggcgaagctggggcttgatgatgatgtgcgttttatcggcatagaagaccgcgttcatgccctgctgaaaacgttggatgtatttgtcatgccgtctctttatgaagggctgcccgtcacgctcgttgaagcgcaggcctccggggtgccgtgcgtaatatcagacggcataacggaagaagccgatgcagggctcgggctggtcaaaaggctcagcctcaaagaaccgcccggacaatgggcatccgcggtgttacgggcagcagaggcggcaaagcctgacggggagcgcattaaagaaaccctcagacggcagggatatgacgcgggagaaaatgcgggggctgttatgaagctttacaatatgaattggaaaaaggaacagtaacgaatgattgtatatgtagtcaatatgggaattgtgtatatttggtcatggttcgcgaaaatgtgcggcgggcgtgatcaatcgctttcgaccggataccggccgaatcagctcgtcatgatcgttccgctgctatcgctcgtattggtctccggtttgcgctacagagtcgggacggattttcagacgtacgcgctgatgtacaagctggcgggaaattacggaagcatttgggagatcttcgggttcggagcgaaaaaagcagccgttgatccggggtttacggctctcatctggctcatgaattttatcacgaaagatccgcaaatcatgtatttcaccgtggcggtcgtgacgtgcagctttattttaaaggggctcgttgagttcggccgtccgtttgagctgagtgtgtttttgtttttgggcacgtatcactattacgcttcctttaacgggatcaggcagtatatggtggcggccgttttgttttgggccgtccgctacgtgatcagcggaagctggaagcgttatatgtcaatcgtgctgctgtgttcgctttttcattcctcagcgctgattatgattccggtttattttctcgtcagaaaaaaagcctggtcgcccgcgattttcggactgtcggcattgtttcttcttatgacgtttctgtatcagaagttcatttcgctttttgtcgtcgtgctggaaaacagctcatacggccattatgagaaatggctgatgaccaatacgaacgggatgaacgtcgtaaaaatcgcggtgctgcttctgccgctgtttttggctttctgctatcgggagcggctgcggaagctctggcctgacattgatgtcatcgtgaatttctgtctgctcggcctgctcttcggtcttttggcgacaaaggatgttattttcgcccggtttaatatatatttcggcctgtaccaaatgatcctgatcccttattttgtgaggatttttgatgaaaaatcaaatgcgctgatttatatcgccattattgtctgttattttctttacagttacttgcttatgccggtcgattcgtctgtgcttccgtacagaacgattttttcccggtaatggacattggaggtttatatggaaacacccgcggtcagtttattaattgctgtgtataatacggaaacttatttagaaagatgcttagattcattgctcaatcagtcgctcgccaatatcgaaatcgtggccgttaatgacgggtcaacggatcaaagcccggcgattcttgaaacctatcagaagcgggatgagagaatccgggtcattcatcagcaaaaccgggggctcggcgcggtccgcaacagggggatcgaggcggcgcgcggcgaatttatcgcttttattgatgcggacgactgggttgaacctcattattgcctgcgcatgtatgaaaaagcgaaggctgatcaggctgatctcgtgatttgcgaatatgcggccgaatttgcggatacggggaaaaccgccgtttcaacgatcgcttcagcgtacgcgggccgcccgaaacaatggtacctgaaagatttatttgaaggaagagtcagcggtttttcatggaacaagctgtacaaaagaaccatgatcgagcatcatcagctgcgctttccgcttcgtgatgagctggagcacgtggaggatcagtacttcagcctccgggcgcatgttttcgcaggtgcggtctcgtacgtggatcagccgctctatcattatcggattcacttgacttccattgtgcaaagctatcagaaaaagctgtttgactcaggtctcgttctctatcggctgaacgaggcttttttgcgtgaaaacggctgcttacaggaataccggcaggagctggattttttcatcgttcagcacggaacagtctgcctgctgaatgaatggaagcggaataacggcggccggttttctgagaagtggaagaatatcagccggatatgcgctgatcccgtgtttcgcctgagcctttccaaaaccggaacggcgccgtttgacgccaaacgctcatgccttctgcttttggcgaagctgaagctgattccgttcgtgtcgctggcatcagccgcgtatcagcgggcaatcgagtacaaaatgaaaatcagagggtgaagacatgtcgatacaatctttaaaaatcaatctcgcggaatggctgttgcttaaggtcaaatacccgtcccaatttcatttcggaacggcagcggatggggcggggcttacagcggcaagaaaaaagatcattctgacgctgctcccgtcccacgataatctcggcgatcacgccatcgcctacgcaagcaaaacgtttcttgaacgggagtatcccgattttgacattgtcgaggtggatatgaaggatatatacagatccgcaaaagcgctgatcaaaaagcgccaccccgatgatatggtattcatcatcggcggcgggaacatgggggatttgtaccggtatgaggaatggacacgccgctttatcatcaaaacattccgggaatatcggatcgttcagcttccggcgacggctcacttttctgaatcaaaaaagggacggaaggaactgaagcgcgcccgaaaagtgtacaatgcgcatcccgaccttttgttaatggcgagagatgagacgacgtatcaatggatgaagcgtcattttcccggaaaaacagtgctcaaacagcctgacatggtcttatatttggataaaagcgagcggcgcatcccgcgggaagggatctacctctgtttacgggaggataaggagagtgcgctgacggctgaggacagaacgatggtaaaagaagctttggcaaaagagtacggcgagctgcattcctttaccacgacggtcggccggagggtcagccgccatacacgtgaaaaggagctggaagagctttggaatacgctgaaaggcgcggaagccgtcgtcactgacaggcttcacgggatgattttttgtgcgctgacgaaaacgccttgtgtcgtcattcgttcgtttgatcataaagtgatggaaggctatcaatggctgaaaaacataccgaacatgacattgcttgaacgtccagaccctgaagccgtaacggccgccgtaaaccggctgctcagcggcaagcatgaggaaggcggttctttgcgcagtgtttattttgccgggctgcgctcgaaaatcagcggtgatgcccaatgaccgcgccgcttgtgagcgtgatcgtgccgatgtataagacagagccttttatgaaaaaatgcgcggtttctttaacaaaacagacgctgagagacatcgaaatcattttcgtcaatgacggttcaccggatcggtcaggccggattgctgaacaattcgccgcagaagatgcgagaatccgggtgattcataaagaaaacggcggcctcagctcggcccgcaatgccggaataaaagccgcccgcggccgttatatcggttttgtggacggcgatgactatgtgacggaaacgatgttcgagcggctttatgaagaagcggagaagaaccggctggatatcgccggatgcggctattataaggaaacgccgtctaagaaaagaacatatatgccgccgtcccttccgccgggtcgcgtcttcacagcggatgaaatgactgcattgctgacccgtgcgcacgaacatcggtttatttggtatgtgtggcgctatatataccggcgagaatcattgcaagggctgttgttccatgaagatatccggtttgccgaagactctccgtttaatttggcagcgttccgccaagccgcgcgtatcaaagtgatagacgaagggctgtatatctaccgggaaaatccgcaaagtcttacagaaacaccgtttaagccccacttagatcacgaactgcaaaagcaatataaagcgaaaatggctttttatgaggaaaacgggctgacggacgcctgccggagcgatatcaatacatatttgtgcaagcatcagattccgatgctgatcgccaacgcatgcgccgccccgcagccgtcacatcagattacggcgcacatcggcagaatcttaacgtatgacatggtaaaaacggcggtgcgcaggacgccgtgccgccataaacagctgctggcgggggagcgcgtggtgctcggcctgtgcaaaatgcgccttcctcttcttctgcatgcgtttttcgaacggaaatcgaaagagaaaggcagtgcggaaggagcatgaaatttgccattaatttcggcgccaatgtgacggcgtttttactatcggtgtttttatcagtgtggatgacgccctttattgtgaaaacattaggtgtggaggcttttggatttgtccatctgacacagaatatcattaactatttctctattattaccgttgcgctgagctctgtcgttgtgaggtttttctccgtcgccgcccacagggggaacagggatgaggccaatgcgtatgtaagcaattatttagccgcgtctgtcgtgatatctctattactcgctgtgccgctcgccgggactgctttttttattgacaagattatgaatgtgccggccgggctcttaacggatgtgaggctctctatcgtgatcggcagcgtgctgtttatgctgacgttttttatggcggggttcgcaacggggccgttttttgccaacaagctttatatcacaagttccattcaggccgtgcaaatgctggtcagggtgctgtgtgtgctcgctctgtttacgtgcctgccgccgaaaatctggcagatccagctttcggcattagcgggagccgtctgtgcggccgtgctgacttttttcttctttaagaaattgattccgtggttttctttcagccgtaaaaccttgtcattacagacgagcaaagtactgttttcggccggtgcctggagttctgtcaaccagatcggcgtgctgctgtttctgcagattgacctcatgacggccaacctcgttctggggccgtctgaggcgggtgtctatgcggcgattattcaattcccgcttctgctcagaagtcttgcagggacgcttgcttcactgtttgcgccggttttgacttcctattactcaaaaggggatatggaaggtctcctgtcttacgccaataaggctgtgcggatgaacgggcttctgctcgcgcttcccgccgcattattaggagggcttgccgaaccgtttctggcgatttggctgggcccgtcgtttgtgcagacggcgccgcttttatacattcacgccgggtatttggcggtcagtctctctgtcatgccgcttttttacgtatggacggcttttaataaacaaaaaacgcccgccgtcgttactttatgtttaggcggactgaatgtcatattggccgtggttctcagcggaccggcacatctcgggctgtacggcatcaccatcgccggtgcagtctctctcattttgaaaaatgccgtcttcacgccgctgtatgtttcgcatattaccggttttcagaaaaccgcgttttacaaaggaatgttcggcccgttggcggcggccgtatttgcctgggctgtctgccggggtatccggctgttttcaccgcttgacagctgggccggtctgatcgccgcggggcttgccgtatgcatgagctatgccgcattcgcttttttcttcatttgtacgaaagaagaaaggcggcttgctttacagaaatgccgaaaagtgaaaggagctgttcagatttgaaggcgaaacgtgtatttgatatagcggccgcgatgttgttattgtgcggcgcgagcgtcatccttctcttcgccatggcagccgtcagatgcgccatcgggtctccggtattgttcaaacagacgagaccggggcataacgggcgtccgtttacgttgtataaactcagaacgatgacggatgcgcgtgatgaaaacggtgtgctgcttccggatcatctccgtctgaccaaaacgggaaggctgatcagaaaactgagcatcgatgagcttccccagctttttaatgtgctcaaaggagatatcagtcttgtcggcccccgccctttgctgatggattatctgccgctttacacggcggagcaggcgcggcgccacgaggtgaagccggggattacgggctgggcgcagattaacgggagaaacgcgatttcatgggaggaaaaattcaagctcgacgtgtggtacgtcgacaaccgcacatttcttctcgacttaaagattctgcttttaacagtgaaaaaagttctcgtgtcagaaggcatacatcaagccggccatgtgacggcaaaacgcttcacaggcagcggaggtatgtcatcgtgaaaaaggtcgtgctgatcggaaacggcggacacggaaaagtcgtgaaggaaatcgtgcaggcccgttccgatatggagcttgcgggcgtattggatgacgaattcagcggttttgccgttcggaacggtttatatacgggccggacgaaagacgtgcacatgcttcggaaactcgtccccgaggccgtattcacgatatgcatcggccgcaacggcgtcagaaagcagttcgctgaaacgcttgggcttgaagatgacgattatgccgcactcattcaccccggggcgatcgtcagtgaaacggcttccgtcggacacggaacggttgtgatggcgggagccgtcattcaggcgggcgctgacatcggcgcccattgcatcatcaatacgggggcggttgccgatcatgacaatacaatcggagattacgtccatctttcaccgcgcgcggcgcttgccggcggagtgaaagtcggggaaggaacgcacctcggaatcggcgcgtccgtcataccgcagattgacatcggcccttggtccgttatcggcgcgggggctgcggtcatcagccggcttcccggccatgtgacggcggtcggcgttccggcccgcgtcatctcccctatccataacgaaaaaggatgatttcatgcaaacaaacaaacggatttatttgtctccgcctcatatgagcggaaaagaacaggaatacatcgcagaagccttccgttccaattggattgccccgctcggtccgctcgtcaattcgtttgaagcgcggctcgcggaatatgcgggagtgaaaagcgcggcggccgtaagctcgggaacggccgccatccatcttgccctgcggcttgcgggtgtgaaaaaaggagacgttgtattttgtccttcctttacgtttgtcgccacggcgaatccgattgtgtatgagcaggctgagcccgtttttattgattcggaatgggagacgtggaatatgtcgcccgatgcgcttgagcgggcgctgcgggatgcaaagcggcgcggcagactcccgaaagcggtgatcgccgtcaatctttacggccaaagcgcgaaaatggatgaattaatgagcctttgtgacgcatacggcgtgtgtctgattgaagacgctgccgagtccttaggatcaacatataaaggcaggcagagcggcacgttcggccgtttcggcatttattcctttaacggcaacaaaatcattacaacatcgggaggcggcatgctcgtgtctgacgatgaagccgcgattgaaaaagcgaggtttcttgcgtcccaggcgagagatgccgccgttcattaccagcacagcgagctcgggtataactacaggctcagcaacattctcgcgggcgtggggatatcgcagctggaagtgctcgaagatcgcgttcgggcgaggagagaaatctttcacaggtatcgggaagcgctggaaacgtatccgggcatccgcatgatgccggagcttgaaggaacggtttcaaaccgctggctgacggctctgacgcttgataacggcgtgacgccggaagaagccgtcgcctgtcttgcggaacagaacattgaggcccggccgctgtggaaaccgctgcatacgcagccgcttttctcatcttccgtcttttatcctcacagcgaacatgagcgtgtctctgagaaccttttcagccggggcatctgtctgccgtccgggtctgacttgtcttctgaggagcagcagcgtgtcattgacgcacttgcgcaactgtttgaaacgaaaggggagaaaacatggacagccgccatgttatgagccgattaaaagaaacgctgacgggtctgctcagcgttataccgccgcaatctgacatcatatatgccgactatcccctctatggaaatgtaggggatttattgataatgaaagggacggaggcgttttttaaagcgcacggcatccgcgtgaaacagcgctggaatcccgacaattttccattcgggcgccgggcggacaaaaagacgatcatcgtctgtcagggtggcggaaatttcggggatctctatccgtactatcagacgttcagggaaaaaatcgtcaaatcctttccggaaaacaggatcgtcatcctgccgcaatcgatctattatcaggatgagacacggcttgagaagacatcggcgctttttgcggagcacaaggatctccacctgtttacgagagatcatgtgtcatacgaaactgcaaaacacttcttttcggcgaatcatatcgggcttatgcctgacatggcccatcagctgtatccgatggcggcgtcagcggctccgtcacgcggcaggcttcattttatccgcacggatggggaaatcaatccgaagctgcaaaacaattcttccgttaaaagctgcgactggcaggatgtgctgtcagcaagcgaccgcaggggaatcgcttttttccaaacgctgaatgttttgaataaaaaagcgggaaacccgctgccgattgcgcggttttggaaacgctattccgatttcttaacgaagaaagcggtcctgtttttcagcaggtacgaatcggtggaaacgtcaaggcttcacggccacattctgtcctcacttctcgggaaaccgaataccgtcattgataattcatacgggaaaaacgccaactattattacacctggatgcacgaagcgccggatgtccgtctgatcggggaaaccgccggcacgaaggaaaaccttccgctttgaatgagcggaaggtttattttgtttctccgcgttttactttgttgtacgcctcatccaaatgctgaattcttttgagcacaaccgagtttttcgtcagctgatcctgaacaagggttgaaacgacggaacggtaatagctgttcatcgcatgaattcggtcttcattcggattcatttcaatgtgctgtgtaaagttttcaataaaataaggaacagaaaaaagttctgacatctataaagcaactccttttaataagtatatacggtatgaaaccaatcatgtacaatgaaaaaaggggagtgagcatgatggatatcaaacttcagcaaacacaaatgttaaagcctcaattaacgcaagagcttaaacaggctatcacattactcggatacaattccgcggaactggccggatatattgatgagctctcactggaaaaccctctgattgaacgaaaggaaacagacacgccgccactatcttaccataaaacaagtaaaaacaggatgaaagaacgggacggaagccagcagatcagacttacccgcaaaacactgcaggattcgctcaaacagcaagccttagatatgaagctgtccgatgatgagaaaaagattttcaattatctgatacattcattggactcaaacggatatttaaaagaggacataccagctgccgccgaccatgtatccgcttcacaagaggagacggaagcggttctgaaaaagcttcaatcccttgagcccgcgggaatcggcgccaggtctttgcaggaatgcatccttcttcagctccgccgtcttcccgagcggaacgaacaggcggaatggattgccgacgcctattttgagctatttgcaagaaagaactggaaagcgcttacactaaaaacgggcattccgcttaaagacattcaggacatcgctgacatgatcagcgcccttgatccgaggccggggctccgttatgcgcatgaggagccgggtttttacgtggaaccggatattttcatcacggtgaaaaacggcatcattcaagcgcggctcaacagccgttcgtttcctgacatccagcttcatacccattatcagccgctcttgtcagctgccgggtgccgtgacacgaaaaattatctgtcggcaaaatatcaggaatggcgctggctgaaccgggctttgtcgcaaagaaaacaaacgatcacgagaattatcggcgtcctgactgaacggcaggaatccttttttctcacaggaaaaagcggaatgcagccgctgaccttaagagaggtggcggaaacgctggagctccacgaatcaacgatcagccgggccatcaaagggaagtacgttcagacgccgtacggactgtatgaaatgaaaacatttttctcggcgaaagctgaatcgtcgggggacggcggcgcctccaattatgccgtaaaagcgcatctggaggcattggtcggtaaagaagataaaaagaaacctttttcagaccaaaagcttgccgatctgctgcatgaacaatatgacatccgaatctcaaggcgcaccgtcgccaagtaccgtgaccaattaaatattccgccgtcatcggcgagaaaacggtacagctgaaacctccccgagccaaaccccggggaggttctccgtgttacgggatcatccatgaaaacagatgatgctgtaaaaatgtaatgagacagacgagcagaagcaaaaacagactgtgcttaatcgtaaaacggaaaaggtcggcctccttgcccgccagaccgacagcggcacaggcaaccgcaatggattgcggagaaatcatttttccggtgacaccgcccgatgaattggcggcaacggagagaaccgggtccatcccgacagagagcgccgtcaccttttgcaatccgccgaacaatagattggcggacgtatcagagccggtaataaacacgccgagccagccgagcactggcgaaaaaaaggtaaacatcgcgcccgtcatggcaagcgcaagaccgagtgtcgtgctcatgccggaagcattcgtcacataagcaaagccgacaacagaaacaatggtcacgaccggaagcgttaactctttcaccgtttctataaacgcttcgccccatgtcttccacgacatgccgagggcgaacttggagatgacggcggcaatcagaatcgccgtccccgctgaaccgaaaagctcaagtttgtacacggcttcaatcggcgtgccgtccgcctgaagaatctgctgatttacaaatgggacgggaggcgtgaaggtcaatgcacgcccggctgcattcagccaggaaagccacattgacgttccttcataatgaccggttagggcagccttcacgccgggaatcccccagacggatatcatggccgtcagaagaaggaaaggagaccacgctttaaacaccgcggcgcccccgtacttgatcggcgcccggtcagcggccgctgctgattcccgttctgccgcgaaacgaaaggccgttttcggtttccaaaatttcaaaaacagagcgagcgcggccatggaaacaagcgccgacagcacatccggaagctcaggccctaaaaaattcgagcttgcgtactgcacggccgcaaaggagacgccggaaacaagaatggccggccatacctcaaaagcttttttaaacccgctcatcaaaatgattaagtacagcggaataaagacggataaaaacggaagctgccggccgaccatttgagaaatttccattgccggtatcccggtcggaccttcgacggcggtaatcggaatgccgatcgcgccgaaggcaacgggtgccgtattggcaatcaggcaaattcccgccgcatacagcggctgaaaaccaagtccgacgagcaaagcggccgagatcgcgacgggagcgccgaaaccggcggcgccttctaaaaacgccccgaatgaaaaggcgatgagcagcgcctgcaaacgccggtcatctgtaattgagagcaccgaactccggataatctcaaactgtcccgttttcacggtgattttatacagaaagaccgatgtgacgataatccagccgatcggaagcagcccgtacaccgctccctgagaagcggacatcaccgctttttccgccggcatgccgtaaacaaatacagcgattaaaagtgaaacggctaacgttaaaagccccgcgatgtaccccttcatccgtttcaccgcaagcgcccaaaaaaagaagataatcggcacgagcgcgcaagctgccgataaaagcaaatttccccctaaaggagcgtacccctgtgtccattgcatccctaaaaaacccctccttatgtcatgtaagcgattactttttatgataaggtcatctgatgaccgggttaattagcattatattttgaaagttttgaaagtacaatacttttcttgaacaaattgtctgaacctgtcggcggtgcgaaaaaagaagtataatagacgataaacatcaagattcacaagtgacggggtgatcgcgttgaaatataaacaaattaaaacgaaaaaaatctacgaggaagtcgctgacgcattgctggagaagataaaagcgggcgagcttaagccgggtgaaaagcttgattccgttcaggcgctttctgagagttttcaggtcagccgctcggcggtcagagaagcgctgtcggctttgaaagcgatggggctcgtcgacatgaagcagggagaaggcacatacataagagaatttgagccgtctcatgtttcccagccgctttcttccgcccttttgatgaaaaaagaggacgtcaaacagctgctcgaagtcagaaagctgcttgaactcggcgtcgccgccatggccgctgaaaaacgcaccgaagacgatttacaaaaaatccgccaagctctcctggagatgaaagacattgacggagacgaagaattgggcgaaaaagcggatttctcctttcacatggcgctggcagaagcatcacaaaacgggctgctcaagcatctcatgaatcatgtctccgcgctccttttggaaacgatgagagaaacgagaaaaatttggctgttttctaaacgaacgagcgtgcagcgattgtatgaagagcatgaacgcatttacagcgccgtcgccgccaaagacgcggatgaagcggaagccgcgatgacggcgcacctgacgaatgtggaagacgtgctgggggcttattttgaagaaaatgtatagaagctgacttgtgaaaggggataacatcacatgcaggccgaatcttttttttccgaccatgtaaagaaagctctgacaaacgatcctcccggggaatggatgccggcagttccgaaagcgtgcatccccctgcattccggctatcccgatcccgcactcgttcctgacaaggagctgaaagaagccgccgcccgccttctggatgaggagcgcgatctgccgctgcattatatgggaagcccgaggacggccgttttaaaaaagcagattcaagaacggttagccatccgcggcattcactgtcgggacgatgagctgctcgtgacgtcaggcgcctgtcaggcgatagatctggctgcacgtgttttcctcgatgaacaaaccgccgctgccgttgaagctccggtctacatggaagcgctcgagatttttaaaaattacacaccgcatatcatgagcattccgacagatcaagagggcctgcaaacagaaacattagcgttcatgcttgaggaaagaaaacgaaaagggcttctgcttccccgtcttctctacacgatacccgcttttcagaatcctgcgggaaccgtaatgtcagcgaagcggagaacccgcctgcttcagcttgccgaaacgtatgattttctcatcgtggaggatgatgcatacggcgagctcggattcaccgatattccgccgcccttgaaagccatggatcaaaacggccgggtgctgtacgccggttcattatcaaaagtcatcgccccgggtatgaggatcggctggattgcaggggacgccgcattcatcacggcattgtcatggttaaaaaaagacttaggccacccgttttcccaagcggtgactgccgtctatctggaacaaacgaatgttgaaaaacggctcgccgccttgcgggaagcatatcaaagcaaacgtgacgttttgctcgccgcatcagcgcgatatcttccggaatccgcatcctggcacgtgccggaaggcggttactttgtatgggtgaaagcgccgggagcggatacatccgcaatgctggcgagggctctttctcacggcgtttcctatgtccccggtaaatatttttttctgcatcaggaagacggtgcggaatatcttcgcctgtcgttcagttatgccggtaaagccgcgataaaagagggtgtgcaaaaactgggacgtctactggaaaacgggatgtagagcagcttgaggagctttcgggcttctctttttttgtccccttcagcgcatcggacgaaaggatttttcagaaaaaccttccaatccatattcagaatagtgtaggatattcatagagctttcccaaaaacaggtcatcagatgaccggatcacatattgaggatgaaagaggggttcatcatgaaagtctcattatttgtcacgtgccttgtggatatgttccagaccaatgtcggaaaggcgacggttgaggtgctggaacggctcgggtgtgaggtggattttcccgaggggcagatttgctgcgggcagcccgcatacaacagcgggtatgtgacggatgcgaaaaaagcgatgaagcggatgattgccgcgtttgaagaagcggagtacgtcgtcagtccgtcaggttcctgtacgacgatgttccgtgaatatccgcatctgtttcaggacgatccgaagtgggcggcaaaagcgcagcagcttgcggacaaaacatatgagttaacggattttatcgtcaacgttctcggggtggaggatgtcggggcggtgctgcataaaaaagcgacagtccatacatcgtgccacatgacgaggctgctcggcgtgtcggaggagccgatgaagcttttgcgccatgtcaaggggctcgagctgaccgcgcttcccggaaagcaccaatgctgcggattcggaggaacattttctgtgaaaatggctcaaatctctgaacaaatggtggatgagaaggtcgcctgcgtggaagacacggaggccgaagtgctgatcggggcggattgcggctgtctgatgaatatcggcgggcgtcttgaccgtaaggataaaaacgtcagagtcatgcacatcgccgaagtgctgaacagcagataacacgagaaacaacaaggggggaaaatcatggcgatgaaaatcggtaccgccgcttttaaagagcgggtatcagaaggaatagataatgagtttatgagaggagccgtctccggagcgcaggaacggctcaggacaagaaggctgcaggcggccgaagaattgggaaactgggaggattggcgttcacatgcggaagaaatcagacagcatgtgctggacaatcttgatttctatttggaacagctcgccgaaaatgtcgccaacagaggcggacacgtctttttcgccgaaacggcggaagaagcgtcctcctatatccgcgatgtcatccggcagaaaaacgccaaaaaaatcgtgaaatccaaatccatggtgacagaagaaatcaatatgaacgaagtgcttgaggaagagggctgtgaagtcacagaaacggatctcggcgaatacattctccagattgacgatcacgatccgccgtcacatatcgttgctcccgctcttcataaaaacaaagagcagatccgtgacgtgtttaaagagagactcgaatacaaacagacggaaaaaccggaagagctcgtcatgcacgcgcgcagcgttctccggaaaaaatttctcgaagcggatgtcggcattacaggctgcaactttgcgatcgcggataccggatcggtcagtctcgtgacgaacgaaggaaacggccgccttgtgtccgcgctgccgaagacgcagatcaccgtgatgggaatggagcggatcgttccgtcattttctgagtttgaagtgcttgtcagcatgctgacgagaagcgcggtcggccagcggcttacaagttacattacggcgctgacgggacctcggcagcaaggagaagcggacgggcctgaggaattccacctcgtggttgtggacaacgggcgttcccgcatactcggcacggaatttcaatcagtgctgcaatgtatccgctgcgccgcctgcatcaacgtctgtcccgtgtaccggcatgtcggcggacactcgtacgggtccatctattcgggtccgatcggcgccgtcttatcgcctcttctcggcggatatgacgaatacaaggagctcccgtacgcatcttccttatgcgcggcctgtacggaagcatgtcccgttaaaattccgttgcacgagctgctgctcaagcatcggcagaacatcgtggaaaaagagggcaaagcgccgatcagcgaaaaactggcgatgaaagccttcgggctcggctcgtcatccccgtccctttataaaatgggatcgaaatgggcgcctgccgccatgacgccgtttacggaagatgacaaaatatcaaaagggccggggccgttaaaagaatggacggcaatacgggacttcccggcgccgcataaatcgagattcagagattggtttaaagaccgggaaaaacaaaagggggaagaatgatgatgaaagggacggttacacatcaggaatcctttttaaaccggatcgccgaaagtctgggcagagagcgcaggaaatcaggcgtgtccctgcctgaatggaagtatcagcctcaatatcaaacgcatgcgggctgtacggaagacgatcttgtcacgatgctgaaagaccactgcgtcaacattcataccgaactgatcgaaacggatgcagccgggctttacgacgctttgcgcacgcaggtgaaccgctttgaaggagggcctgtcatcattccgaaggacagccggtttgaaacgtacggcttgcagacccttatgacagaagagtggccggatgaaggggttcccgtttgggaatgggacgcggaacaaggagcgaaaaatattgaaaaagcggaacaagcgaatgtgggcatcacattcagcgagatcacgcttgcggaatcagccaccgttgttttgtatgcgtcagagcatgccggccgttctgtcagcctgcttccgaccacctatatcgcaatcatcccgaaatcttccattgtgccgagaatgacacaggccagcgatatactgaaacagcagatcagagacggcgtcaccgttccttcctgcatcaactatattactggaccgagcaactcggccgatatcgaaatggatttggttgtcggcgtccacggacccgttaaagccgcttatatcctcgtgaatgaccgataaaaaaacaacccccggtttgcggccggggtttgtttttatataaacgcgttaatgatcatgataaaacagattgcactgacagaaataatcgtttccatcgccgtccatgtcaggaacgtttcttttaccgtcattccgaaatactctttaatgagccagaaaccggagtcattgacatgtgacagaatcaaagagcccgctcccgttgccaaaacgagaagctcactgctgacgcccggcatgacagatgcaatcggtgcaacaatgccggccgccgtcatcatggcgacagtcgctgaacctgtggcgacacggatgaccgccgcgatcgtccagcttaaaagaacgggagagaagcttgagtgtttcgccatgtcagcgatatacgtgccgacgcctgaatcaatcaggacgttgttaaaagcgccgccggctccgatcacaagcagaatggaagcaatcggtcccagacagtcattgctgaattttaaaatgctttctctgtcaaagccctgataaaaaccaaggctgaaaaaggagtaaaccgtggcgatcaaaagcgccgtgacagggtcgccgataaatttaaaagtttcatagagcgtgcttttttccggaagcgcaatttcggcaagcgttgccataagcatcaggatcaccggtaccaatatcgtaaacaatgtatttgcgaatcccggaagcttgcgtttttcattccgttcaataaattgttttttcaacagttcgggaacgggtttatgaatgcgcttaccaatccattttccgtaaagcggccccgcgatgatggcagtcggaatcccaacgattaaagaaaacaaaatcgtttttccgacattggcgtgataaatgccgacagccgccatcgccgccgggtggggcggaaccaatccgtgcacgacggaaagtcccgcaaggagcggaattccgatcgtcactaatgaaaccccggtttcaatcgcaatcgtaaacaaaagcggcacgagcaggacgaagccgacctggaaaaagaccgggatgccgacaataaaagcgacggccatcatcgcccaatgcactttctttttgccgaagcggccgatcagggtgtgggcgatacgctccgcaccgcctgattcagccatcatttttccgagcatcgtaccgagggccagcacgatcgcaagcagcgacagcgtattgccgagcccggttttcatcgaagcgataatgtccggcagattcatgcccgttgcgaaaccgacaaggatggatgtaatcaaaagactgataaacggatttaatttagcgaccgtaatcaataagagtaaaacgataatagcggcaatgacaataaacagtaacatgaccttttcaccctttcaaagaagaattaacggctttgtttgagctgaaattcactgatgacgtcaaattcatctttgagcttgtcatacagccgctcgtataagtaaaacagctcaatatatgtttcgctgtttttgacgttcggttcatggcggtgagaaattctgatccagtcctgaacatcctcgatccgttccatttcgccaaggctgtgcaaagcgagaacggccgctccgagcgccgaggcttcgtaactttccggaacgaggacttcccgtcccatcgtatcggacaaaatctgcctccacagcggcgatctcgcaaatcctcccgaagcccgcacgtcttttgcggggcccgccaaatctctcagtgcgacaccgattgaaaagacgctcatgatgacgccttccagcaccgctctgataaaatgctcccgtttatggcggaggctgatgccgaaaaacgttccgcgggcattcggattccaaaacggcgcgcgctcccctgataaaaacggcagaaacagcaatccctcagagcctgcgggcactttatcagcgatatcaatcattaaatcatacggatcaatgccgagccgcttcgccgtttcgacttccggagaagcgaattcgtctcgaagccagcgcagcataatgcctccgttattcgtcgggcctccgatgacccaatgcttgtcagtcagcgcgtaacagaatgtccgcgctttttcatccgtaatcggcgcatccgtcaccgaacgcacggctccgcttgttccgatcgtaacggccacttcgcctttgccgatcgcgccgactccaaggttggcgagcacgccgtcattggcgccgataataaacggtgtatccgcatgaatgcccatccgtgcagcgatttccggcgcaaggccgcgcagctgatgagtggtcggcacgatgtccgacagctgatcttcccggattccggcaatccggagcgcttcttcatcccaggaaagcgtatctaaacggaacagccccgttgccgaagcgatcgaataatcgacgacataagttccgaaaaactcgtgcagaatatattctttaatactgatgaatttggcggttttcgcgaatgtctccttgtcctgttctttcatccacacaattttggaaagcggagacatcgggtgaatcggcgtacccgttcttttataaatatcaaaaccgttcatctcttttaaaatacgttttgattgctcggcgctgcggttgtccgcccaaatgatgcttttggtcagcaggccgccgttttgatcgacagctatcaatgagtgcatggcggtgctgatgccgattgcaagcagattgtcagggctcagtccggcctttgtgacggcgcctctgatgcttccgataaccgcttccagaatgtgctcaggatcctgctcggcccatgccggctttggctgtattaaatcatagtgaaccgaatgcttggctaacactttgcctcttggtccgaacagaacggctttcgtactggtcgtgccgatatccagaccgataacagcttgggtttccttcataatatatcccgcctaatctgattgaataataagatagattgataatgtatgcccttacaaagtcaattataggaataatttttttataaatcaacgatgaagaagaaaatttttttcataaaattgcctcaattcccgctgtatcggcattctctcttttgaaaaataaatattacaaacgtttgtgcgcgatcatttttctgatttgctgcaagttggcgagcgttttctcctgccgcagccgggccgtggcgaaatacagtgtatcaatgaccgacagctgggcaagccttgcggacattgcttccgttctgaaagccgtctcccttgttgatgtatacagcaccacgtcggaaatctgggtgagcggcgacttttggtagcttgtaatgccgatcgtgccggcgccgagcgatttggccgttttcaccgcgtcgagcacgtccttgttgcttcccgaatgagaaataccgatgactgcgctttcaggaccgagaagacccgctgacatcgcctgaaagtgagaatccgtgtgcgcgatgcaatttatacccgtacgcataaatttatgatacgcgtctatggcgatcagcccggaaccgccgtttccgtaaaattcgattctgtctgcgcggtgaatcatttctaccgctttttcaacgtcggccgggtctaataaatgaaaggtatcggtcagaccggaaatgtttgtgcggaaaactttccggatgatgacttcgatatcgtcgtcggggctcatttcttcatgaatgtgctgcaccggctcctgaacgatctcctgagccagcgtgatttttaaatcctgatagccggaaaaaccgagccgtttgcacagcctgaaaatcgtcgcttcagagcttttcgttttttccgccagctgaatgatggaaaggtgaaccacgtctttcggttccttcacgatatggtctgcaatcgctctcaattttggcgacaaacctttgctggccgcctgaatcttcccgatgctgcttgaattcacaggggtcatgctataacctccctactcgaatgtaaacgcatacttttatgataaagcaagtttcaatataaggaaaacagaattttaaaattgttttttcaatttggcgtataaaaaaagagaaaaagccgccgatgatagaaagtgaggaggcatctggatgaaaaaagcatggattctcgtcatatcattcggcattgcgcttgcgctgtttttatacgcaaacacaaaggtgaaagcggaaagcgcggcgcccggaaagcaaagccttgtgtccggatttcagctgagactttcgaatgaccgggaaggacaatagacggcaaaaattagtattgactttgaaaatagaagactgtatattatgttactatattcagaaaataaaaactcaaaagattcatttaacataaaacactgtgaacgggagcagtaaaagaatccaatcagaaaaagagagccgcgggttggtgcaacgcggactgattgttctttgaactcgcccggaagtggcagggcggaacggaattatcggaatattccctatgtcctaacggctgaccttcgttaaaaggtttttaagctggattccggatattcgggatcaacaagagtggtaccgcggctgcctgaggcacgccgtctcttttcccaaagaggcggcgtgcttttttatgtgatgaacactttttgcgagagggcgtgtgatagatggaaaaggacaagcaaacgttaaaacggacgatgtcgtccagacacattatgatgatggcgcttggaggcgcaatcggggccgggctctttaaaggcagcagcacggcgattgatgaagcggggccgtccgtgctgctggcctacctcctcggcggaatcattctgctgtttattatgcaggggctggccgaaatggctgtcagaaacaaacatgcaaggacgttccgtgatttggttcagcagtctctcgggtcgtacgctgcatactttttagactggatctattggaaaatgtgggtgctcaatattgccgctgaggcggtcgtagccgccattttcattcaatattggctgccggaatgtccgatatggatattggctttgatcatttccattgtggtgacggtcgtaaacatgctttctgtgaaactgtttgccgagacggagtactggctcgcgctcattaaaattacagtgattgtcatctttattttatgcgggattctgctattatttttctcattcggcaatcacacggcgccggggctgtctcatttaacggatcacggagggtttttcccgcatggagcggggggcgtcattacggcgatgctcgtcgtgatctactcatacggaggaacggaaatcatcggcgtcacgctggcggagacaaaaaaccccgaaaaggtgatcccgaaagctgtccgtagcacgttaacgcggattgtcgctttttacttgctgccgtttttcatcatcgtcagcctgattccttggaatcaagtcaacagcgttcccgaaagcccgtttgtcatagtatttaagatgatcggaattccgggtgccgaccatattatgaatgccgtcattcttcttgcgattatctcgtctatgaactcgggactgtacggatcatcccgcgtcttgtttacgcaggcttctgacggccggctgccgaaaatcttttcaaaactatcgaagaaaaaggttcccgtctatgcgattctgacttgtacgtcatttttatatgtaggcgtcctgatttctttattcgcgggaagccagacgtttaattatttgatgggttccctcggctataccgtgctgttcatctggctgattatcggattcgcccatttgaaatcaagaaaacattcaacagaacagccggcttattacgtcaaatggttcccgtacacgacatggtttgcggtgcttgcgcttttggccatcctgatcggcgtaattgcgacgacatccatcgtcatcacatgcatcactgcggccatctatctcctcattacggctgcgtatctcgtgaaagggagacgtcaataaataaaaaactcttgccccgcggcaagagtttttttaatgaacggcctttttttctgcggccagagcaggtgttttcagtttctttggtgttatattcacaaaacaaatgcttgtgacgatcagaagcagtccggctaaaaggctgacggtcagcggctcatgcaggaatatcgagctgacgacaatggatatgagcgggatcaggaaggtgtaagaggcaaccttgcttgcttcccctgaaccgacaagcgtaaaaaaggcgagccagccgagcgcgataacaaaaactgaaatgaacagaaggctgagaatgaacggagctttccattgaatcgctgaaaagctttctgaaaaatggccggagctgacaagcagcacgccgccgatcagaagctgaagagcgaccatccagatagagtccgcgcgtccgcccgttcttttcacatataccgtgccgagcgcccagctgaccgcggagcctaaggccaaaagaatgccggcgatggaaatatggcctccgaaaccggctgcgctgatgacggcgacaccggcaaagcccagaataagaccggctatttttaaaggatacatcgattccccgagccacagccaagaaaaaacgcccattaaaaccggctggaaaaacacgatggctgaaaataagccggcaggcaggtaattcaagccgaccgtttgcaggccgtaaaataaagtaatatttaaaatggcagaaataagatagatcggccacgtttctttaaaacgcagctttttaaaacggggcagcgccaccattaataatagaagtccgccgatcagcgtgcggattccggcaaacagaagaggcggcgaataggcaagcgcggcctttgtcagcggccagttaattccccacaccgtgactagaaacgccagcataagagccgtctgtattttcgaaagctgtttcacgtcgttcactccttgtagaacaattccatcatatgatacggtaatcagtaagataaataaaatgaatcttttttataaggagcataagtaaaacgttatgacgattacacaactgcgggtttttgttcaaatcgctgaaacgggaagctttacaaaagcggggcaggcgctgaatatgacgcagcccgctgtcagccatgccatctctgcgcttgagtcagagctcggcatcaagctgatcatccgcgagcgccgcaacggcgtaaggctcacggacacgggcggaaaaattctcgtccatatcagagaggtgctcaaaggcatagaaaaagccgagcagctggcggccgcggaaagagggcttgaacagggaacgattcacatcggcacatttccggccgcttccgcttatttcattccaaagctgatcagcgtgtttaaaaaacggtatccgaagcttgagttggtgcttcatgaaggaacggttaacgaagtaaaggaatggctccgctcccgggtaatagatgtgggtatcactctttttcctacggaagacatggaatatctgccgctgaaaaaagataaaatggcagtcgtgcttagaaatgatcatccgctttgcagctgtgagtcaatcactctgaaagatcttgaccgccagccgatgatcatctgtgacggaggatacgaatcaccgtttattgatatgtttaaggaggcaggatctgtgctgactgccgcattcactgtttacaacgtcaatacgtccatcagcatgatcaaagaggggctgggaattgcgatattatcacaaatgtctatgtcgggaatatcgctgccggaaaatgtcgtgacaagagaactcaatcgtgcggtgtaccgagatgttctgcttgccgttccgtccgtaaaggaggcttcattggcggcaaaactttttattcaaatcgcacaggaactcacaaagaacgaataaaaaaagaccctaataatcatagggccctgaatcttatcggttaattttaaaagaatttgtcgtattgacaagttttgaaccgctgaacgtggctttgacacgataataacctgtcttgcatccttttaaagagaatgacttagtcacccttactgagaaagaaaaggttgtttttttacaagtcgtccatttctttccggactttcgctgtaagtataggtttcctttaaaagttcgatctgacggatacgctgtactgagagtaaaatcgacacttttcgcttttttcgtgtagtaggaggcatcggtaaatccgcttacatttaaatgctgctgagtgccggagtaaaagtctgcggcatatgccttatcggtgtttcctgtaaagaagattgctgccagtaaagctgttgtgagtgccattaagatttttttacgcatatagacaatgacttccttcctattcaatatcatacatatcttaacattattgggtttgttctttcaacgatagattttcacttttataggatgaaaagctcatcatatctgaatgtaatagattcattcatacagagttcactagtgacgaccgctgactgattgttcgaagatcatcgaatcaaattgtttaactcacgggaaaagctgtggtaaggtgtgtggtagagaccttgtttaagatctgcttacactaaaccgcaaaggagaaaacgatggctgaacatacattgaaagatactgcgttttccgtattgaatttatcgccggtcgtacaggggggaacggttgctgaatcgttccgcaacagcatggatttagcgcgccgcgccgaggagtggggctataaccgctattggcttgcggagcatcataatatagaaggagttgccagctcggcaacggcggtgctgatcggccacatcgccggcggcacgaaaaaaatccgcgtcggttctgggggtattatgctgccgaatcattcttcacttgtgatcgcggagcaattcggaacccttgaaacgttatatccggggcggattgacctggggctcggacgcgcgccggggaccgaccaattaacggccagagccttacgaagaaacataaacagcggggaagattttccggagcagcttgaagaattgagaaattacttcaaaccgacaggcaatgtgcgcaatcaagtccgcgccattccgggcgaagggctggacgtgccgatctggcttctgggctcaagcggattcagcgcgcgtcttgcgggagagctcgggcttccgttcgcctttgcggctcacttttcaccgaaaaacaccgtgcccgcccttgagctgtaccgcagctccttccgtccgtcagacgtactggatcaaccgtacgcgatggtcggcgtcaccgtcattgccgccgatacggacgaaaaggcggagcatctggcaacatcgcattatcaaagatttttagacctcgtccgcggcacgccgaaccagctgaagcctcctgttgaagacatggatcaaatctggtcgccgtatgaaaaagcgatggtcaatgaacagctcagttcaacgatcgtcggcggaccggagcgtgtgaaggaaaagctggaaagcttcatccggacaacacaggcggatgaaatcatggtgaattcagaaagctttgagcatgccgacagaatgagatcatttgagatcatcgccgaattaaaaaacagctgagcaaaaaaagcaatgtgccgcgcacattgctttttttattcgccgatccgcctgactgaattccggatgacgagttccggttcatacacgacgtcatccttcttcggttttttatgctctaagcagtcgatgacgtattttgccgccgctttccccataatggatttcggatgcttgacagaggtgagcttcacctcggaaatctgggcgaaatgtgaatcgtcatagcccatgaccgatacgtcatcaggcacctttaacccgaattccctgagaagattaatcgtcttcagcgcaatttcgtcattgtagcaaagaatggccgtcgggtgtgatccgctgttttgctcaagggtatgcttaattttttggagaagcacggtttctttttcttcagtcgtgtaagtgacgatcatgtccggagacgggaaaatcccgcgctcccgatgcgcctgcagatagccgttcatccgtttgacgccctgcgtgtcatccgctttaaagattcccataatgtgcgtgtggccgagggacatgacgtattcgcaagccatcatgccgcctttgacatcattgacggaaaagcttggtgcggccagctccgcataagaggcgttaatcatggcaaacggaatgccgtttttctccagattgagatagtagccgatgttgggcgtctgcagcgcgcttttcgtaggctcgacaatcagcccgtctatatttttggacagcaggttttcaagaccgcgccgttcactttctgtattgttgttggtgctcgtcagcagcatggaatagccctgttcgcttaaataagattcgattcccctgatgatgctcggaaaaatatagtctgatatgtacgttgtaatgacgccgatcgttttgtttgaatgcatggctgatttcgccgtgcgtgaagcgacaaaggtgcctccgccctgaacgctgtacagcagcccctgcgagaccaaatctccgatcgcctttctgatggtatggcggctgacgccgaactgctgcatcagctcattttccgtaggcagcttttcgtccggctgtatttttccttgattcagccatgaacaaatttcttcttttacttgagcatatttcggtagcatatcaattcctccaaaatgtatacggacaaattccagtataacatagtaagccctttcatcaagctgtaaaaataattgacagattatgaaaaactgcttattctttatttgtacgtactaatttcccttatttttagataaaattctttataagtacgtacaaatgtggcggttctgaagaaaacaaagcaacatcaagcgccgcactcagatttgtaagcgtttttattctattattcgcgggagggtaaaattcatgaagaatcacccggcaccaattggctcaaatgttcctgtcactcggcagcattccaagtggtttgtcattctcatctcatgcgcggccggactgggagggcttttgtacggttatgacacggcggtgatttccggcgccatcggtttcctgaaagatttgtaccgcttaagtccttttatggaagggctcgtgatttcaagcattatgatcggcggtgttttcggcgtcgggatttccggatttttgagtgaccgtttcggacggagaaagattttgatggcagcggcgctgttgtttgcggtgtcagcggttgtctctgcgctttctcaaagtgtgtcttccttagtgatcgccagagtcatcggcggtctgggaatcggcatgggctcctcgctttctgtcacgtatattaccgaagccgctccgccggccatacgcggcagtctgtcttcactgtatcagctgtttacgatattagggatatccggcacttattttattaacctcgccgtccagcagtccggctcgtatgaatggggagtgcacaccggctggcggtggatgctcgcttacggcatgattccgtccgtcatcttttttatcgtgctgcttatcgtgccggaaagtccgcgctggcttgcgaaagcggggcgccgaaatgaagccctcgccgtgctgacgcgcattaacggcgagcagaccgcgaaagaagaaatcaaacaaatcgaaacgtctttacaattagaaaaaatgggttcattgtctcagctgtttaagccggggctgagaaaagcgcttgtgatcgggattctgctggctttattcaatcaggtcatcggcatgaacgcaattacgtattacgggccggaaattttcaaaatgatgggtttcggacagaatgcggggtttatcacgacatgcatcgtcggtgtcgttgaagtgattttcaccattatcgcggttcttttagtcgataaggtaggccggaaaaagctgatgggggtcggatctgcctttatggcgctgttcatgatcttaatcggggcatccttttattttcagctggcgagcggtccggctttagtcgtcatcatattgggattcgtcgccgctttctgcgtatcagtcgggccgattacatggatcatgatttcggagatctttccgaaccacctccgcgcacgcgccgccggtattgcgacgatattcttatggggggccaactgggcgatcggccagttcgtgccgatgatgatcagcgggttagggctcgcgtacaccttctggatattcgccgtcattaatattctctgtttcttgtttgtcgtgacgatctgccctgagacgaaaaataaatcattagaagaaatagaaaaactctggataaaatgaaagcgttttacgacaaaagtccgctccggcgggcttttgtctgtcaccttcattccgtttctgtatataatgactgtatcaaggagatactggaaaatcctgcgaagaatgtcgaggaattgacctttaacagttgaattaacaatgtcatcctgttaaaataattaaagaaagcagacataattttttttggctatgatgggacgttttttgtcatagcgggacattttctgtccagtatgaataggaaggaacgtttgagtcatgaaccagttaatacaagctcaaaaaaaattattgcctgatcttttgcttgtgatgcagaaaagatttgaaatcttgcagtatatcaggcttaccgaaccgatcggccgcagaagtcttgctgccagtctcggattgaccgagcgcgttctcagaagcgaggttcagtttttgaaagaacagaatctcatcgatattaaaacaaacggcatgacaatgacggaagagggctattcactgctttcgattctggaagatacgatgaaggatgttttaggattgacgcttctggaaaagacattaaaagagcggcttaatctgaaagacgccattatcgtttccggagacagcgaccaatctccttgggtcaaaaaagaattagggagagcggccgttgcatgtatgaaaaagagattttcaggcaaaaatatcgtcgctgtaaccggcggtacgacaattgaagccgtcgccgatatgatgacgccggattcaaaaaaccgcgaactcctgtttgtgcccgcaagaggcggtttaggcgaagatgtgaaaaaccaggcgaacaccatatgcgcgcatatggcggaaaaggcttcaggcacttaccggcttttgttcgttcccgggcagctgtcacaaggcgcctactcatctattattgaagagccttccgtaaaagaggtgcttcacacgattaaatcagcgagtatgctcgttcacggaatcggcgaagctagaacaatggcggagcgaagaaacacgcctttggaagatttgaagaaaatagatgacaatcatgcggtgacagaggcattcggctactactttaatgcggacggagaagtcgttcacaaggtgcattcagtcggaatgcagcttgatgacctcgatgccattcccgacattatcgcggtagcgggcggatcatcaaaagcagaagcaatcgaagcttattttaaaaagcagcgaaacacggttctcgtcacggacgaaggagccgcaaagaagttattaagggataacagtccctcaatataaatatctctcacttatttaaaggaggaaataatcatggcagtaaaagtcggtattaacggttttggtcgtattggacgtaacgtattccgcgcagcattaaacaatcctgaagttgaggtagtagcggttaacgatttaacagacgctaacatgcttgctcatcttttacaatatgattccgtacacggaaaattagatgcagaagttaaagttgacggcagcaaccttgttgttaacggcaaaacaatcgaagtttctgctgagcgcgatcctgcgaaactcagctggggcaaacaaggcgttgaaatcgtagttgaatctactggtttcttcacaaaacgcgcagacgctgcgaaacacttagaagcaggcgcgaaaaaagttatcatctctgcacctgctaacgaagaagatatcacaatcgttatgggtgttaacgaagacaaatacgatgcggctaaccaccatgttatctctaacgcatcttgcacaacaaactgccttgcgccgtttgcaaaagtacttaacgacaaattcggcatcaaacgcggtatgatgacaactgttcactcttacacaaacgatcagcaaattcttgatcttccgcacaaagactaccgtcgtgcgcgtgcagcagctgaaaacatcattcctacatcaactggtgctgctaaagcagtttcccttgttcttcctgaactgaaaggcaaactgaacggcggagctatgcgtgtgccgactccaaacgtttctcttgttgacctagttgctgaactgaacaaagacgtaacggctgaagacgtaaacgcagctcttaaagaagcggctgaaggcgatcttaaaggaatccttggctacagcgaagagccattagtatccggagactacaacggcaatgctaactcttctacaatcgatgctctttctacaatggttatggaaggcagcatggtaaaagtaatctcttggtacgataacgaaagcggctactctaaccgcgttgttgaccttgcagcttacatcgcaaaacaaggtctttaattcatagctcccggaaagggccggacttggttctttcggacagaaacgctataatgaaagcggacaagggaaggggacggactccctttccctttttccatgagaaccggctttcagaaagcgccggattgctgcagaacgtccgcgttttgaagtttccgcggcactttcgttttctgagccgcctgccctggctcagaagacgatctgccccgtgcccggaagctgcaatctgccccgcggcggaagcatcatgaggcggtttcacgtttcacgtttttcgtgctatgcaaaccattttgaaggaggatctcctaaggcatgaataaaaaaacagtaaaagacatcgacgtaaaaggcaaagtcgtattctgccgcgttgactttaacgttccaatgaaagacggggaagtaacagacgatactcgtatccgcgctgcgcttccaacaatcaaacaccttgcagaccaaggcgcgaaagtccttcttgcgagccacttaggccgcccgaaaggcgaagtggttgaggagcttcgtttaactcctgtcgctgcacgcttaggcgaactgctcggcaaagaagtgaaaaaagcggatgaagcttacggcgatgctgtaaaagcacaaatttctgatatgaaggacggagacgttcttgtattggaaaacgtacgtttctaccctggtgaagagaaaaacgatcctgagcttgctaaagcatttgctgagcttgcggatgtatatgtcaatgacgcattcggtgctgcccaccgtgctcacgcatctacagccggaattgccgagcatctgccggcggttgcaggattcctgatggaaaaagagcttgacgttctcggcaaagccgtgacaaatcctgagcgcccgtttacggcaatcatcggcggcgcgaaagtaaaagacaaaatcggcgtaatcgaaagtctgcttgataaagtggacaacttgatcatcggcggaggtcttgcttacacattcgtaaaagcgcttggttatgaagtcggtaaatctcttcttgaagaagataaaatcgaacttgcaaaatcattcatggaccgcgcgaaagaaaaaggcgttaaattctatatgccggaagacgttctcgttgctgatgatttctctaacgatgcaaacgtccaaatcgtgccgatctctgagatcccaagtgatttagaagcgatcgacatcggaacgaaaacccgcgaaacgtacgctgaagttatcaaaaacagcaaacttgtcgtatggaacggaccgatgggcgtattcgaaatcgacttgttcgctcaaggcacaaaagcagtggctgaagcattggcagaggcaaacgatacatactctgtcatcggcggaggagactctgcggcagccgttgaaaaattcggccttgctgacaaaatgagccatatctcaacaggcggcggcgcatcccttgaattcatggaaggcaaagagcttccaggtgtagctgcgctgaacgataaataaaaactgctataaggaagtggaacagatgagaaaaccaattatagccggtaactggaaaatgaacaaaacactcggcgaggctgtcagcttcgttgaagaagtgaaatcttccattccagcagcagacaaagcggaagccgttgtttgcgcaccagctcttttcttagaaaagctgacttctgctgttaaaggaactgacctgaaagtcggcgcccaaaacatgcattttgaagaaaacggtgcgttcacaggtgaaatcagcccggtcgctctgaaagaccttggcgtggattactgcgtcatcggccactctgagcgccgtgaaatgttcgctgaaactgatgaaacagttaacaaaaaagcgcatgccgctttcaaacacggcattgtgccgatcatttgcgtaggtgaaacgcttgaagagcgcgaagccggaaaaacaaatgatcttgttgccgatcaagtgaaaaaaggtcttgcgggtctttctgaagagcaagttgccgcttccgttattgcgtacgagccaatctgggcaatcggaacaggcaaatcttctacagcgaaagatgctaacgacgtctgcgcgcatatccgtaaagtcgttgctgaaagcttcagccaggaaactgctgacaagctccgcattcaatacggcggcagcgtaaaacctgcaaatattaaagaatatatggcagagtccgatattgacggtgctttggtcggcggcgcaagccttgaaccgcagtcattcgttcaattattggaggaaggtcaatatgagtaaaaaaccagctgcactcatcattcttgatgggttcggattacgcaatgaaacagtcggaaacgcagtcgcacaagcgaaaaaaccgaatttcgaccgttattggaaccaataccctcatcagacgctgacggcatcaggcgaagcagtcggactgcctgaaggacagatggggaactctgaagtcggtcatttgaatatcggcgcaggacgtattgtgtaccaaagcttaacacgcgtgaacgttgccatccgcgaaggcgaattcgaacgcaatcaaacgttccttgacgccatcaaaaacgcgaaagacaacgacaaagcgctgcacctgttcggccttctttctgacggaggcgtacacagtcatatcaatcatttattcgcgctgctgaagcttgcgaaaagtgaaggactgacgaaggtgtatattcacggtttcctcgacggccgcgatgtaggtccgcaaacagcgaaaacttacattcagcagctgaatgagcaaatcgaagaaatcggtgtcggcgaaatcgccagcatttccggacgctactattccatggaccgcgacaaacgctgggaccgtgtggaaaaagcgtaccgcgcaatggcttacggcgaaggcccgtcttaccgcagcgcgatggatgtagtcgacgattcttatgcgaacggcattcatgatgaattcgtcattccgtccgtcatcacaaaagaaaacggtgaacccgttgcgaaaattcatgacggcgattctgtgattttctataatttcagaccagaccgcgccatccagatttcaaacacgtttaccaacaaagatttccgcgatttcgaccgcggtgaaaatcatccgaaaaacctgtatttcgtctgcctgactcacttcagtgaatctgttgacggatatgtggcttttaaaccggtaaaccttgacaatacggtcggtgaagtattggcacagcacgggttaaaacagcttcgcattgcagaaactgaaaagtatccgcacgttacgttctttatgagcggcggccgcgaagaagaattcccgggcgaagagcgcatcctcattaactcgccgaaggtcgcgacatatgacctgaagcctgaaatgagcgcgtatgaagtgaaggatgctcttgtaaaagaaatcgcggctgacaagcacgacgcgatcatcctgaactttgcaaaccctgacatggtcggccactccggaatggtcgaaccgacgattaaagcaattgaagcagtggacgaatgcttaggcgaagtggttgacgccatcatcgctaaaggcggacatgccatcattaccgctgatcacggtaatgcggacattctgattacagaaacaggcgaaccgcacactgcccatacgacaaacccagtccctgtcattgtgacgaaagaaggcgtgacgctgcgcgaaggcggaatcctaggcgacctcgcaccaacgttattagaccttctcggtgttgaaaaaccgaaagaaatgaccggaacatctttaattcaaaaataagcgtaaatcaaaaggagagacaaactcatgccatacattgttgatgtttatgcacgcgaagtccttgactcccgcggcaacccaacagttgaagttgaagtatatacagaaacaggagctttcggccgcgcattagtgccaagcggagcttctacaggtgaatacgaagcggttgagcttcgtgacggcgacaaagaccgttaccttggaaaaggcgtgttaactgctgttaacaacgtaaacgaaatcatttctccagagcttctcggctttgacgtaactgaacaaaacgcaatcgatcagcttttaatcgagcttgacggaactgaaaacaaaggcaaactcggtgcgaacgcaatccttggcgtatctatggcttgtgcgcgcgcagctgctgatttcttacagattcctctttaccaataccttggaggattcaactcaaaaacgcttcctgtaccgatgatgaacatcgtaaacggcggagagcatgctgacaacaacgtagacattcaagaattcatgatcatgcctgtaggcgcgcctaacttccgtgaagcgcttcgcatgggcgctcaaatcttccacagcctgaaatcagttctttctgctaaaggaatgaacacagctgtaggtgacgaaggcggattcgctccgaaccttggttctaacgaagaagcgcttcaaacaatcgttgaagcgatcgaaaaagccggcttcaaacctggcgaagaagtgaaacttgcgatggatgctgcatcttctgagttctacaacaaagaagacggcaaataccatctgtctggcgaaggcgttgtgaaaacatctgctgaaatggttgactggtacgaagaaatggtttctaaatacccaatcatctctatcgaagacggacttgacgagaacgactgggaaggccacaaacttcttacagagcgtcttggcaaaaaagttcagcttgtcggagacgaccttttcgttacaaacacgaaaaagcttgctgaaggtatcaaaaacggcgtaggcaactctatcctgatcaaagtaaaccaaatcggtacattgactgaaacgttcgatgcgatcgaaatggcgaaacgcgcgggctacactgccgttatctctcaccgttcaggtgaaactgaagacagcacaatcgctgacatcgctgtggcaactaatgcaggacaaatcaaaacaggtgctccgtcccgtacggaccgtgttgcgaaatacaaccagcttcttcgcatcgaagatcagttggctgaaactgctcaataccacggtatcaactctttctataacttgaataagtaatggaatggacgccgggagatattctcccggcgtttttttatgctcccgggcttttccctcctttttcatcattttcatttggtcaataatattcatttttcccctttttaaaggaatcagtgttcttcaatcgaaagggaagaggtgttaataagaggagggattatgatgaaattttcatttatgtcagccgcggtggcagcaagcgtcatatggggcgcgtctgccgggccgctgtccgaaactcatgcttattcagccgtgaccgcgccggtttttgatgctgatgaggcattggacacgatgcatgatctgagtgaaaccatcggaccgcgggaaaccggaactgcgaaagaaaaggaagcggctgaatacatatcgaatcgcctgcgggctcagggcgtcagtgtcaaagtacagtcatttccattgaaaaagtacttttcaggttcagtcacagcgggagatcatgaatttccgctccgctccgctgatcaatccgctgttgaaaaagagctgagaattgagggagggatttttgacggcggctgcggatcacgcgatgacgtaacaggagccaaaggaaagattgcagtgatacgcgaaggaaagatccccgtttctcaaaagatcaaacatgccgaacaagcgggagccaaagcagtcattatttataatcagacaacaaaaccgctcgccgtccgtccgcataccgataaaggaatcacaataccggcggcgggtatgaaaaaagaagacggtgaagcattgctgaaggaaaagcaggcagtcattcaatttaaaaactataaaaaccgcacctcacaaaatattataggaacgcgcaaagcagcacaggccaactcttctgatgctgatattatttatgtcacagcgcattatgacagcgtaaaaggcgcacccggagcggatgacaacgcctcaggcacatctgccgttctggaaatcagcaagcaactcaaacacataccgaaagacaaagagatccgctttatcctgttcggtgcagaagaattatggtctgcgggttcatcttattacgtcagtacactcacgaacaatgaaagaaagcacagccaggccaattttaatgccgatatgattgcgactgactgggaagaagcgagtcaaatgtgtgtcacgactcctgacggcaaggaaaacccgagcgtccggtatgctgaaaaagccgctgaaaaatcccgcttggtcaagccaaacctgattcagctcggttactcagaccatgtctctttttatgaagcagggattccgtcggctaactggatttggctcagccccgatacacaggagccggggccttggtatcacaccgagaatgataatatgaaacacatcagcaaagaacgattagagaaagcgggagcactcgtttccgcggctgtaactgaggcagtgaaagaataaaagacaggcttcggcctgtttttttatattgttttctgtatattctctcaattgagggagattttctcactcgttaccagatatataccatttgacaggattttattttacaaataaaagaaaaataaatagataatacctaatttataaaaggatgtaaaactcatttatcaaattttaacttttgttataattgcgatatcgatcgatatttgttttaaattgtaaaaaacaatactcttttctatctattagggggcgaaaaatgaatactgtcacaaaagaagccagcaaccttggtcaaaaacggctgttacatctgattgaaacgaagcaggcgattgtaggcgtgttaggcatgggatatgtgggattccctcttgcgctggaatgtgtcgataaaggatacaatgttatcggattcgacaaaaacagtgaaaaggtttccttgttagccgccggaagcagccatattcaagatatagaggacgacagactgaactcggctttacaaacaaaacgctttcaaatcagcgccgacatgtcgctcatccaaaaatgcgacatcattgtgatatgtgtgccgacacccctgaacaaaaaagacaagatccccgatttaacctacatcgacagtgcagttgacagcatgattgcttatggaaggcagcatcagcttttaattttagaaagcaccacctatcccggaacaacgaaaaaaaagattgccgacagaatggcagcaagccgcggcatgaaaataggaacagacttttttacggcttattctccggaaagaatcgatccgggcaacaggcaatatgaagtttcagatattcctaaagtagtcggcggaaccacacagacttgcacagaacttgcctcagcgttttacagcaccattgttacaagcattcacccggtcacctcacccgaagtagctgaaacagctaaactcctagagaatacttatcgttatgtcaatatagctcttatcaatgaaatggcgcttaattgccgtgaacttgatattgatatatgggaagtcatctgcgcggcggacacgaagccgttcggctttcaaaaatttatcccgggccccggagtcggaggccattgtatcccgattgatcctttttacttcaaatggatcgcgaatgaaaaagggctgcagacaaaattaattgatctcgcggacgaaatcaattccaacatgccgatttctgtctctgactatgctttgaaactggcgggcaaagacaaatgcagcatcttaataataggggccgcttataaaaaaaatacaaatgacccgcgtgaatcctcagtgtttacgataatggaagaattgatggacaagggatgcgcgattgattatcatgatccgtttatcagcgagatccgcttgaatgacggaagctgcaaacaatctgtccctttcacaaaagaacaaatcaatcagtacgacgtcatcatcattcatacagatcacgatgtcatcgactacagtattttgaaggatgtctcaccgattatctttgacacaagaaatgtatgcaaggaaaaatcagccgacaattgcagagttgtcactttataggagggaacggtcattagtaatcgatttatctcttttcacagacctgatatgacaagcgaagaaatcgcaagcgtaaccgaaacgattcaatcgggctggatttcgaaaggcccgaaggtaatcgattttgaaaaaaagctgggagaatgtataggagccgaacacgtcatcagctgtaattcaggcaccgctgcattacatatggctttattggcgctcggtgtgggagaaggcgatgaagtcatcgtgccgagcttcacgttctgttccagcgtcaatgtcatcctgcacgccggagccgttccggtgtttgcggatatatgcgagaaaagtctttgtgccgatcctgaagatgtccggaagaaaataacgccgcgcacaaaagcggtaattgcggttcattttgccggctatccggctgatctggaaaacttgcaatccatttgtaaagaaaacggattgtatctgattgaagacgccgctcatgcgctcggtacaaaatataacggaagcatgatcggcactcacggcgatgccgtgtgcttcagcttttatgccaccaaaaatattacaacgggggaaggcggagccctcgtcatgaaagacgaacaggccgcagaaagagcgaggctgtacggctggcacggcatcacaaaaaatgcctggaaccggtacggtgaaaaaggcagctggagatacgacgttttactgccgggctttaaatataatatgacggatattcaggccgcgctcggtctggttcaattgaagcgcgcaaacgacattcaagaaaaacgggaacagatcgctcaattttatgtacgtgaactgtcaggccaatctgacaaagcggcgcttccgctttctgacattccaaacggcataacgcactcatggcatttatttattttgcggattcgagaaaacggcggtatggacagagatctgtttattgagaaaatgaaagaaaaacaaatcgggctgagcgtgcactttattcccgtgcatttgcatccttactataaaaaacattttcctgcggagcttccggtaactgaacgtgttttccgggagatcgtgtcactgcctctttacagccagttatcagatgaggattgcagctatattgtcaagtctataaaagaagttttgactatcagccaggaggtaggatcatgaaacatattgcgattatcggaggagccggttttatcggaagcgaactggcggcattattacaggctaaaggttatcacaccatcattgcagaccagaagaagccggcttttgacactgaataccgccaaacggatatccttgaccggacgtccctccgcgaatcactgcggggagcggatgcggttgtccatttggcggcaatggtcggagtggacagctgccgaagcaatgaagaagacgtcatacgggtcaattttgaaggaacaaaaaatgtcactgaggtatgcggtgaattgggaatcagcacacttcttttctcatcgagttcagaagtgttcggagattcaccggattttccttataccgagacaagcagaaagcttccgaaatcagcttacggaaaagccaaactgcaatcagaggaatatttgagagaacaggcttccgacgaacttcatattcgggtcgtccggtactttaatgtatacgggccgaaacagcgcgaggattttgtcatcaacaagtttttcagcctggccgagaatggctctgagctgcctctttacggggacggcggacaaatacgctgcttcagctacatcagtgatatcgtcaccggaacttatctcgctctcattcatgaaggagccgtctttgaggacttcaatatcgggaacgaccagccgatcacgataaaagaactggctgaaaaagtcaatgtgctctcaggcagagagaaggataactatctgtttaaaaagctgggcgaagacggcgtgaggggaaaagacatcgaaatttttaagcgggcgccgtcaatcgagaaggcgaaacgtttgctcggttacgctccgaaagtaagtctgaatgaaggcctggagatcataaaagatgaaagacaaaagcacaaactttcactttcctaaaaacccggaagtggtcaaatatcccgtttatcccggacagttttccgtcagcggccgtctgcgcgcagtgaaacacttgcttactgccggacaaagcggactgactgaaaaactggaaaaacgttacggaaaaggggttgtgctgacctccagcggcagtgcggcactggtgctcgcattaacttattcgggggccgggccggggaaagaagtgattttctcatccttcagctgcccgaatgtcattgatgccgtgctgcaatccggtgcgacgcctgtgtttgcgcagctggatgagcatctattcttatcttttgaggatgtcaaaaaaaaagtgacgaggcgtacgtgtgcggttatcctcacgcatgtatacggccggagagaaaataccgctatcattgactgggcgaaggaacacggaattgctgtcattgatgatgccgctcaagccatgtttacaaaacaagcggatacatttgccggcggtttgggcgatttcggcattttaagcttcggcccctcaaagccgcttgcgagtatcggaggcggcgcgttaatcgcgccgaaagaatggcttcggcaaaaagcaaatctcccgatggaacagcgcagccaagtggcagctgactatcgaatctatatcagaaatcaaagaatccaagctgtaatgaaacggaaacggcatcatcctatttcatatatgtttagaaaagcgggcgccatgccttccatgaaagccacaaagctcgaagctctgccggataaaccggctgttgtacccgtgcttcgcatgcatccggcaagggaagccattattgatgatcagctttcacgtatggatcagcttgtaacagcttcgcttcgaaacttagagacggcgggagaaatctttgcaaaggcgggagaaacaaacggcataagaatgatccagccccaagaaggagaacatctgaattatttaacaattgtatttccccgggatgaagagcggtacgggtgttccgtttatttagccgaaagaggcatccaaacatgctggaactaccttcccctcgaacgtattccgatttatgaaacatacgcgggggaaggcggggaagacccgctttggaagagagttctttctctgccttttaaacctcctcttcaaaaggagcaagtcagatatatagccgaatccgttttatcatattatgagcaaaagaataagactgaatagtggtgataactatgcaaaaaacagcagtatgcacgacccgccaggcatgggatcgggccgctgacatgtatcaggcggggttgtttcaaagctatgattggggaatcctcatggaagagcttcccggcacgtcatttcaccctgtcagactgacaacggacggaggacaggtcatctatcttccgctttttgaacagaagggcgtattatccggcaacatgatcggatacggcggcgttatttcagatcgccccatctcatttgaatggcttcaaagtgaaatccaggccatattcggtcggaacatatcccggatgctgctgccgtacggtcagacttcttttacagaagaaatcagggaaggatggacggaaaaggcaacgcggattctttcgcttccggacacgtttgacgagctttggacgggcatttccggaaaagcccggacggcagtcagatacgctgaaaaagagaatattgtcacccggctgatcgggcgaaaagaacttggcgcgttttatgacctctacaaagagcatacagcgtcaatcggcgcagcttatgtgctgagccagggctttttccaaaagctgcttgacacgtttgcggaccggatgttttggatcggagcatatcaggatgagacgctgatcagcagcagtatttttctctatgaccgctctcatttctattattggcagaatgtaaacagcctggcgggaaaaaaagcgcaggcctcttacttattgatgcgtgacgccctgcaattcgccatttgccgcaagcttcaatgggctgattttggctattcacacagtaaagaaatcgcgagaccgaaacgatattggggagctgaagaaaaacaatgccgactttttacgaaaccggaatgaaaacaataagcggccatcaatccagttatctgccgtggtacggtttttttgaaaaaatgtataagtcggatctgtttgccattcatgacacagcccaatttgagaaaaaaggattcctcaaccgcaacagaatcaaaacgccgcaaggccccagatggctgacagtgcctttgcagatgaaacaatataaagacatagagcttcggcatatgaaaatcgaccagacacaggattggcggaaaaaacattggatggcgattaaaatgaactatgcgaaagctccctattttgagcgataccagcatttttttcaagatgtctatcagcgggagtgggaatatctccatgatttgaatatgcacatcattgaatttttccgaaaagagctccgaattgaaacgccgctctgttatgtctctgagcttgaatgccggaaggagaaaaaaagcgattttgttttagcgctttgtcaggagctgggggcggaccgttattattcaggcagtcagggttccgactatttaatagaaagcgattttgaaagaaacggaattgtcattgagtatcagcagatccgacattttggctatcctcaattattcggggagcatatccctcacctctccatgctcgatatgctgatgaactgcggagcggatacagctgaaatgttagttaaaggagggcaatatgatgaaagtaatggtatttgcagcgcatcccgacgatgaaattatcggcgtcggcggcacgctcgccaaacatgtccgccaaggtgacagcgtgtcggcagtcattatggcggaaggcaagtcatcaagaaaaacggattacaaaaagcctgaagattccgttatggagcattctaatcaagaaacggagcaggcgctcagcactttgggcatccatgattttgtcaggctgaaccttcctgataacagaatggattcaatggatttgctggatgtcgtgaaggaagcggagaaacaaatcaatcgttttcagcctgacattgtgtatacccagtacggcggtgacattaatattgaccactccgtcgtattcagagcggtcatgacggcaacccgtccgcttcccggtcatacggtaaaacgggtttttgcctatgaaacattgtcttcgacggaatggaattactgtcagaaggatcagtttcatgccaatttcttcgttaatattgaaaacgagcttgaaacgaaattgaaatcgatggcgtgttacggttccgagctcagagacttccctcatccccgctctttgcaggcgatcgaacataatgcccgtgtgtggggagcaaaagcgggtttttcggctgcggaagcgtttatgcttgtgagaggaacatggtgactgtcctatgattgctcaaattccgtttttcggacttgatccgaagcaaatcgatgagaaatgggtggaagcgggatacggtctggaagcgaatatttttgacggccattcctttggggaaacggattatctcaaaacattcaatcagacgctggaatatgcgaaacagcttgatccttcattattgacgctgcatttcccgacagatcatgccgattatgtgcatgaagatcacatcaaaaaacagctttatcactttgcggagctagctgtgaaatacggcgccaaaggcataaccgttcatgcgaatcaatttatgacggttgaggaatttcaagtctatgacctggaaggaaaccgtaaaaaaatcgttgagtttttcgcggagtttgatgagcggctgaaagggacagacatttggatcggtgtggaaaaccttccgatcatcgggaatctgggagaggattttgatccgattttcatttatcctgaggattttacagagctggtggagctggatctgaagcatgtcggtattacgtgggatctgtgccattgggcgattacctatcagactcacttgtcttccgcccttatgttcagaaatgatcagctgaaatatcccgatttctttcagtttctttcgataaaagagagcattaagcattatcacttcagctcatttcgccagcttgcgttcccgcatggcggcgtccgctgttttgagggccgccatccgagtgaagggacaatcgctgaggagctgctgagacgtgctgcagatactttgcaggagctttatcggactcaagataccggcattgtatttgaggtgatggaagaggattatacggaaagacgggaatcatggagaacgctggaatggttcggcggtgtttctgatgacgaggatcaaaaaagggtctgatatgacatatcgaacaccgaactatgcaaagctttggtgtgcacaggtgttttcttcagcagcggatggggtctggctcattgctttgccgctgttagtgttagaattgaccggcagcaaaattctagtcggcgttatttcttttatcgaactcgtgccgttgacatttggcgtgctggcggggccgctgattgatttattccgaaaaaagtcgatcttgtatttgtgcaatacgggccgggccgccattatgatcctcttggcggtgctcagcgcgaacgatttattaaccgtgtggatagccggggtgtgcgccttttgtctatctctgcaatcgatgctgtttgcgccggcgaaagtcgcgatcattccgctgctcgtccgcaaacagcatcttgatcaggcgacatctctgatcaatacgagtgacttgatcggactcatcgtcggaaaattgatcagcgggatcatgattgcggctattccgttcgggatgctgtttgccctaaacggcactgcttttttgatctctgcggcatttatcgcgttcattcgtatttcagaacagcccaatgaaaaaagcaacggaactgaagatgtaaaagccggttacagaatgctgaaaggaaatgcggcatggctgacatcggtcggatactttttcgtcgtaaatctcgtcattgccggccttatttcagtaatggggccgattcttgctgtggagcgttttcagcagaactattctgtatggtttgccgtcatgtattcaatgtttcaggcggggatgcttttgggcaatctggccgtatttttcaaatggaatacaaaacgcttgaaccggctgtacccgcggacgttaacggtagcgggactgctcattatgctgctgttttttccccttcatgggtttgagtgcatcatcttcctggtgcttggcatcatcatctcgtatattgatgtgcaaacggtgctgtatttccaaaagacggttccggccgcatatttcggaagggtctttgcactgattttttccattgtcaaaatgggtgaaccgctgtcggccgctgtctacacagggcttctgctgttgatgaatgcggattatattttcgcggcggtcggactgacccttacgatcgtttttgctattttttcagtcagacaagggagtcaaagaaatacagagaaacaagcggatcaatccgtctgaatggtaaacgaaggggcgccgatgtcagccggcgccctttttatcataaatccaaataaagccgtatcatatcccggcattgaatgccgttttcaaaaatgtcttcatcataatgtctgataaaaaaatcatggtcgacagcctgaatgcggaatccgcatttttgatagagtgacagctgatgaatactggaatttccggtgccgatttcaatcgtgtcagctcccgattgtctcgctttttcaatggcatcccgcaccagctgttttccgaatcccctgttctgcagcgattcttttaccgcgatgtttacgatttctatcgttttaggccttgtttgcaataaaacgtaaacccctgcaagctcgtctgacgtccaagccgtatagcattctcctcttacaagataatcatcgacaatctctttcgacggatcggccagcagcaatagttcatacagcgcttcatccggctccgcggcttttcggatgctcagtttttgcatgtccgtttctcctcctccgttatgatcgacagctatttttgaaaataactccaaaatcattctactttattataaaatatgaaacataggaaaagttatacaagttttgcagattgaataggaggaaagtcatgtttttttgtaagcattgcggccagcagaacaatgaagaagcgcatttctgtaaagaatgcggaaaaccgatcgggaaaggaagccggctggagcggcaggcggctgtaaaagcggctgaacctgcttcacaaatgagaaagccgatccctaaaaaaacgctcttcatgtggggcggcattgccgcagcgctgatcttattgattgccgcatataaaaccggagcctggctgacatctgaaaaaaggctcacggatcaattcgaacaggcggttcatgacggggacacgaaaaagctcgcagccctgctcactccttcagacaaaaaactgaagctgaatgagaccaatgtcaaaccgctccttgcatacgcaaagaaacacgatgaactgctggcagcgcttcgcggcaattcatcagaaacagatgcggtatacgttaaaaaagagggaaaaacccttcttttgtttgaccattacgaactgaaagtcgatccggtttatttccgcgtcacaagcaattataaaggcgccgatctttatatcaacagcgagaaaacaggtacggtcaaaaaagccgatgaaatccaaatcttcggcccgtatgcacccggtgtctacacggcggaagccaagcttaaaaatgagacggttgacgttgtcaaaaagcaagaggcagaggcggccggaagccggaatgttgagtttgacctgccgttagacgccgaggatgtgacattcactcaagcagacagcttcaaaagcgcgaaaggcgatctgctgataaacggcaagtccgtccataaagatccgtttacatccgttacatatggtccgctcttaactgacggttccatgacagccgccgtggaggctgattttccttgggggaaaatgaaaactgccgatgtcccgatcaacagtactgatgtggacttaacgcttatcccggatcaagatacacaacaaacaatcatggacacgattgtcaaaacaacgaagcagtatacaaaagcgatggcagacggaaataccgatcagatgaccgaggctggttccgcctggaaagagcagacgaaagaagtggtatccggcatgaagagttccggcacctttttgaaggatcagtataaagagacaagctttgatctggattcatttgcgatttctcaagagaacggccgctggcaagtaactgttacgggtaaagagcttcatgagtctgcttatttcgacgggaatacgaagcctgatatggaagaggctgagccgagctttcactatgtactctcatatgatacaaaacataaaaaatgggttttcgaaaaagctgaccctgcctcagattcttctgggacaaatgtaaaaaaaataaaaaacgaccagccgaaaacctatacatccgcatgggcatcttccaaaggaaacacagcttcaggcagcgtgacaaacgagcaagtcacatcgtttatgactgattacctgacaaatcaatcaagcgccgtcagccttaacaattttgccatcatggcgggtaatttagaagagggaagccctttgtatgctgatcagcagaaactggtcaaaaaactgcacagcgaggggacgaccgaagtatttaatgaagtgaatgtcaaaagcttttcacagaaaggctctcatctgacgattcacacgtacgaggagttttatattacgaaagccggcggcagtccgaagctcagaacatacaattggacgtatggcggcgttgttaaagacggaagaatttatttaacatccattcaataaaaaaacccccgcgccaatcaggcggcgggggtttccgtttttaaaagaagaaataattcatgagttcttttatataatgcttgatcgtgaattgaaacgttacgcaaatgatcaaatagatgacgataacagaataaatgatatccgccttagtagtgagctgatgctgatagctcgccagcatgagcggaggcacggcaaacgccgctcctaaaagaccgacagccagaatggtgaagcaaacggttgtatgaagcagcataaaaatgagggcaagaagcaaaatagctgtaaacggaatcaaaaatgccccgaatctggacagcgaatctttaaatgacacctgggcgccgccggccttcaaagcgataaaaatcaagagatacaggcaaaaaacgcataatgcaaaggtaagcgccggcttgatcacaaccgcggtaaaactgacgtcacgaaagccgtctgataagagaatataaaacataaccggcgtcaccaggcagaaaagcaccatgttgatgatgctgctgacaagctgttcgccgcctgtcgttttacatgtttgatacggtcgctttaacacatcaagcacgaataaggcaaattgctttgaagcctgcttagccgcggcgccggcctgagcggcctggccttgcgtttgacctgcgcctccctgcccgggctggggcgccccgcacttttcacaaaattttccgccatcagtatgatggccgcattgagaacaatacattctaaaactccttttacaagtaatatagggattttgttcaatatttacattataaaagaaaataggacggatgtaacggagttttctaaagatatacaaatcaccttctctatgaattgataatagagaaaaagtaccctttatggtagaattttattggagctgatagatatcatgtctctcggcgcattgattcagagtgaaaaaggaaattaacgcatgctaaaaaaattgaaaatgctttatcggctgttaaaattcggaaaaggcttatggagatagcaaacagaaaaaaccgtccttacaaggacggtttttttctgtttccggatcgtccggctgaggttataaaaagcagaccccggggtaaaaaccatgcataagaaacagcggagaacaaaacataactcaataacggcaagtcataaggaggtacgcatgttttcattcatcattcatgtcttcatttcactgtttgcagtctccaatcccatcggaaacgtgccgattttcctttcactgacggaagggtactcggagaaagaacggacagcgatcgcgcgcaaggcttccgtgctgtcgtttatcatcttggcggcttttttaatcttcggccatctgatctttaaactgtttgacattaacattcatgccttacgtatcgcgggcggcatttttattttcggcatcgcttataatcttctgaacgcgaagaaatctcatgtacagtctctccatcatgaagagaaaggggagagcaaggagaaagccgatatatctgtgacgcctttgtcgattccgattatcgccggacccggtacgatcgcgacggtgatgagtctgtcggccggccatggcggcatcttccattacatcagcgtgcttatcggcattgcggccgtcatcgcgatgacgttcatcttctttcactattcatctttcatcagcaataagctcgggaaaaccgaaatgaacgtcattacccgactgatggggctgattttggcggtggtggccatcggcatgatcggcgccggtctgaaaggcatgttcccgatattggtttcctgacttaaaaaagcagcgcccggttatcttcgggtgctgcttttttctattttcggcacatgctgaaacacttcttcactctcaaaaaattctatcaaacggctcagccagtcataataatggagccaatccgtcagttcatccaaaagctgacgggctttttcttcaatatcgggactgagattttccgattccagaagctcagtcagctcgcggttcagctttttatagagcattttgtttttgctgaccgcctttgtccaatttgccgtaaacagggagataaacgtctggtaataatcacgctccacgtcataaaggtctttccgaacgcctttttcaaacactttttcagccagattgacatcggtcatttcgcggaccacctggctcatcctcgttttgctcatcccggtcgcctctgacagctcatttaacgtcatcggcttgcggttcatataaataataccgagcacacgtcccagtgtggccggcattccgaatgtatgcatattctcggcgattctctcaatgagatgctcttcagcatgcccgatgatatcaagagcgtttttttccacggctgatcatcccttcactggcttttcatgctgacaatatatcatattttttacagttgatgaaaaagatgatgcggcaggatatgcgagctatcgggagcgattgtaagaacatccgcattgtcagcgggataacatgaaaaaatacgtatattgtatataatttcaacacattgtaaactttttattttacaaatttcatcttataataaagattatacttttcagaaaaataacggaacccttcggaggtgcacggattgctgagattagaaaatgtatcaaaagtctataaaggcggaaaaaaagctgtcaacagcattgatttaaatatcgaaaaaggcgaatttatttgttttatcgggccgagcggctgcggaaaaacgacgacgatgaaaatgattaacagactgattgagccgtcatccggaaagatttttatcgatggcgaaaacattatggagcaggacccggtggagctgagacggaaaatcggctacgtcattcagcagatcggacttttccctcatatgaccattcagcagaacatttccctcgtgccgaaactgctgaaatggccggaacaaaagcggaaggaacgggcgcgggagcttttgaagctcgtcgatatgggcccggaatatttagaccgctatcctcacgagctgagcgggggacagcagcagagaatcggcgtgctgcgcgcccttgcagcggaaccgcctcttattcttatggatgaaccgttcggagcacttgatccgattacgcgggattcccttcaagaagaattcaaaaaactgcaaagaacattgaataaaacgattgtctttgtaacccacgatatggatgaagccattaagctggctgaccggatcgtcattttaaaagcgggagagatcgttcaggccggcactcctgatgacatcctccggaatccggctaatgagtttgtcgaagaatttatcggcaaagaacggttattgcaatcaagaccggatattgaacgcgtcgagcagatgatgaacaaaaagcctgtcaccgttacggcggacaaaacgctttcgcaggcgatacaggtgatgcgggaacaccgtgtcgattccctgcttgtcgttgatgacctgaatgtgctgcaaggatatgtggatgtggaaatcattgatcagaaccggaaaaaagcgagcctcgtcggcgacgtgctccgctctgatctgtatacggtcgagcaggggacactgctgcgtgataccgtacgcaaaattttaaagcgcggaatgaaatatgtacccgtcgttgatgaacaaaggcatttagtcggaattgtcacgagagcgagccttgtcgacatcgtttacgattcaatctggggtgaggaagaccagctggtgacaggctgacaaggggaggaacgcttacaatgaatgaaatgatcaagtttttgcagacgaacggcggagaactgttatataaaacgtgggagcatttatacatttcgatcatcgccgtcatattaggcattgtcgtcgccgttccgctcggagtggcgcttacgagaatgaaaaagggcgcaggcgccgtcatcggcgccgtcaacattgtgcagaccttgccgagtctcgcgatactggcgttttttatcccgctgttaggcgtgggaaaggtgcccgcgatcgtcgcgctgtttttctattcggtgctgccgattctccggaacacgtataccggcattcaaggcgtaaacaaaaatctgctggaatcgggaaaaggcatcggcatgacggtctgggagcagatcaggcttgtggaactgccgcttgcggttccggtgatcatggcgggcatccgcacatccaccatttatctgatcggctgggcgacgcttgcttcctttatcgggggcggcgggctcggagactatatttttatcggcctgaatctctatcagcctgaatatattatcggcggcgccgtgccggtcaccattttagccattatcattgattatctgctagcggcgacggaacggaaggtgacgccgaaagggctgaaaggactgaaggaagtatcataaggagttggctgttttgaaaagaaaccaaaagagatggatgtgcgcactggcgctgtcagctgctctgcttctaggcggctgttcccttcccggcctgagcggggcttccgatgatacgatcaaaatcggggcgcaaagcatgacggaatcagaaattatcgccaatatgatcgcacagatgattgagcacaatacagacttgaatacggcattaattaaaaacctcggatcgaactatgtccagcagcaagcgatgctcggcggtgaaatcgatatcgccgcgacgcgctactcgggaacggatttaacgagcaccctcggcatggaagcggaaaaagacccgaaaaaagcattatccatcgtacagaaagaatttgagaaacgcttccattacaaatggtttgattcttacggatttgagaacacatacgcttttaccgtcacgaaagagcttgcggaaaaagaccatttagacaaagtgtccgatattaagaagcatgcggatcaatttaagctcggtgtagacaatgcgtggctgaaaagaaaaggtgacggctataaaggctttaccgacacgtacggctttgaattcggcacaacctatccgatgcagatcggacttgtatacgatgccgtgaaaaacgggaaaatggacgccgtcctcgcttattcaacggacggacggatcaaagcgtacgatctaaaaattttaaaagacgacaagcagtttttcccgccgtatgactgttcgccggtcattcccgacagcgtgctgaagcagcatcctgaactgaagggcattgtgaataaactgatcggcaaaatcgatacggaaacgatgcaggaattgaattacgaggtggacggcaagctgaaagaaccgtccgtcgtcgctaaagaatttttggagaaacatcattattttgaataagaaatgaggtggggcaaatggaagtgctgcagcagctcggcacttattattctcaaaacggcgcctatgtgcttcaggagttttaccgccattttctcatgtcggtatacggcgttttatttgcggcgatcgtcggggttccgctcggcatcttcattgccaggcacagaacattaagcggctgggtattcgcggtgacaaacgtgattcagaccgtgccggcgcttgcgatgcttgcggtgctgatgctcgtcatggggctcggcgccaatacggtgatattgtcgctgtttttatattcgcttcttccgatcatccggaatacgtacacgggcatcgccagcattgaacacgcttatcttgaatcgggaaaagcgatgggcatgaccaaatttcaggtgctccgcatggtggagctgccgcttgcgctttccgtcatcatggcggggctgcggacggcgctcgtcatcgcgatcggcattacggcaatcggtacgtttgtcggcgcgggcggactcggtgacattattgtcaggggctcaaacgccacgaacggaaccgcgattattttggccggcgccattccgacagcgctgatggccgttatcgcagatcttgtgatggcatggctggagcgggcgctgagtccggtgagaaagaaaaaacgaaccaaagcgccgaatgcggcatgaaaaaaaacgccttgcgggtcagggcgtttttttcttatggcttcggaacatgcttgaaaatttcttcgctttcaaaaaactcgatcagacggctgatccaattgtagtaatctagccaatcctttaattctttcagcagttcgttgattttttcctcagcttcttccggcacgccgttttcaaggacggctgtcagttcgcggttcagctttttatgcatcattttatttttgctgacgaccttgctccatgtggccgtaaacagcgtaataaaggtttggtaataatcctgctcgacgtcgtataaatctttgcggacgcctttttcaaacactttttccgccagattgacgtcaagcatttcacggaccgcctgactcattctcgtcttgctcatgccggtcgcttctgataattcagttaaggtcatcggcttgcggttcatataaataatgcctaaaatgcgccccaccgtcgcgggcattccgaatgtatgcatattttcagcgattcgttctatcaaatgatcttcagcttgttcgattacgtgtaacggatctttctccaacagtttcaatcctttcagtcagcaattccgatgtcaatataccacatttttaaaccggcggaaatgctcttccgagagaatttggcagtaatccggagcaataagaagaactttgccggtcaatacgggttaatcagtgcttacacaacctttatatataatatggacaaattgtaaactttttaatttacaaagtttaatttataatggaaaacgttcaattgtctgaaaagttaaatttgaatttaacgaattgaataaacttaatcgtggaggtgtgagtgtttgctgacattagaaaatgtctcgaaaatgtataaaggcgggaaaaaagccgtcaacagcatcaacctgaatatcgccaaaggcgaatttatttgttttatcgggccgagcggctgcggcaaaacgacgacgatgaaaatgatcaaccgcttaattgaaccgacagaaggcagaatcctgatagagggccgaaacattatggaacaagacccggtggaactcagaagaagcatcggctatgtcatccagcagatcgggctgtttccgcatatgaccattcagcagaacattacgctcgttccgaagcttttaaagcatcctgccgaaaaacggaaggaacgggcgcgggagcttttaaagctcgttgatatggggcctgaatatttagaccgttaccctcatgaactgagcggaggacagcagcagcgaataggtgtattacgggcacttgccgcagagccgccgctcatcttaatggatgaaccgttcggggcacttgacccgattacgagagattcccttcaggaagaatttaaaaaactgcaaaaaaccttacataaaaccatcgtatttgttacccatgatatggacgaagccatcaagcttgcggacagaatcgtcattctgaaagcgggagaaatcgtccaggccggaacgcctgatgagattctcagatttccggcgaatgaatttgttgaggagtttatcggcaaggaacggctgatccaatcatccagccctgatattgaacgggtggagcagatcatgaatcccgatcccgtgacggtaacacctgagaaaacactgtcagccgccattcagctgatgcgtgccgagcgggtggattcgctgctcgtcattgatgaaaagaacgttctccaaggttatgtcgatgtggagatgattgaccgcaatcgaagacaagcggtaaccgtcgcggaagtgcttgaccgggatctgtacacggtcagaagcggcactctgctccgcgacgccgtccataaaattttaaaaagaggcatgaaatttgtgccggtccttgatgaagccggccggctaacgggaatcgtgacaagggcaagcctcgttgacatcgtctatgactccatctggggagaagagaatcagctcgcggtgatgttatgaggaggcttcaattgatatgaatcagaccgtgcaatttttacaggcaaatggaggagagatgctttataaaacatgggagcatctgtacatctcattaatcgccgtcatggcgggcattctcgccgccgttccgctcggcgtcgtgctgacgaggatgaaaagaggagccggcgccgtcatcggcatcgtcaacatcattcaaaccttgccgagccttgccattcttgcgttttttattccgcttttaggcgtaggaaagatcccggccgttgcggcgctgtttttctattccatgctgccgattctcagaaacacgtatacggggattctcggcgtcaatcggcatcttctggaatcgggaaaaggaatcggcatgacggcatgggagcagatcaggcttgtagaactcccgcttgccgctccggtcatcatggcgggcatcaggacgtcttcgatttatttaatcggctgggcgacgctcgcctcctttatcggcggaggcgggctgggagattacatttttatcggcttgaacctttatcagccggagtatattatcgcaggcgccgttccggtcacagtgctggcggcagccgtcgattacatgctggggatgacagaacggaaagtcacgcctgacgggctgaaaagcataaaggacgcttcataaggaggaggtctctcatggggaatagatgcaaaaaacggctgctcgcaatcgcctgtatcggcatgctgctccttggcggatgctcgctcccgggattgagcgccgcatcggaggacaccattaaaatcggcgcgcaaagcatgaccgaatcagaaatcatcgcgagcatgctcggacagatgatcgaacatcacagcgggttgaagacaacggttattaaaaatctcggctccaatgccgtacagcagcaatccttgataaacggtgatattgatatcgccgcgacgcgctatacaggagacgcgctgacgggcacgcttcgcatggagccggaaaaagacccggacaaagcgctgcggctcgttcagcgtgaatttcaaaacagatatgacatgaaatggtttgattcttacggctttgataatacatacgtctttaccgtttccggacagcttgcccgcaagtatcatttagaatcggtatccgatgtcaaaaaagaagcgtctcatctgaaattcggcgtcgataactactggatgaagctgagaggcaacggatatcaggattttatgaacacatacggaatgtcatttgaaggtacgtatccgatgcagatcggccttgtttacgacgcgctgaaaagcagaaagatggatatcgcgctcgcttattccaccgacggaagaatcatcgcttacggactgaaaacgctgaaggatgataagcggttctttcctccgtatgactgttcacccgtcgttccggatcaagtattaaaagagcatcccgaactggagggcgtgatcaataaaatgatcggcgcgattgatacaaagatgatgcagaaaatgaattacgaagttgacggccgattaaaagagccgtccgtcgtggccaaggaatatttagaaaaacatcattactttgaataacggaaaggagatgtgcggatggacacgatgaaggagctgtttacgtattatgctcaaaacggcagttatgttctgtatgagtgctggcggcactttctcatgtcggcgtacggcgtcgttttcgccgccattttcgccattccggccggaattgtgacagcaaggcacgggcgtctcgccggctgggtgtttgctgtggcgaacgtgattcaaaccgttccggcgcttgcgatgctcgccgtcctgatgctcgtcatgggactcggcgccaatacggtcatcacggctttgtttttgtattcactgctgccgattctcagaaatacgcacacgggcattatcaatatcgagcacgcttatctcgagtcgggaaaagcgatgggcatgacgaaataccaaatccttcgtatggtggagctgccgcttgcgctttccgtcattatggcgggtctccgaacggcgctcgtcattgcgatcggcatcacggcgatcggcaccttcgtcggggcgggcggcctcggcgatatgatcgtcagagggtcgaacgcgacaaacggaaccgccattattttggcgggcgccatcccgaccgcgctgatggcggtagccgcagacctgctgatggcgtggctggaacgagccctcagcccggtgaaaaaacaaaaaagaaagctgatcgtacgctcagcctcatgaaaaaagcattcttccgcgtgaagaatgcttttttttgatttcttgattaaattttgataactgcgctgtaaagtcttacttatcaaataacaaagcagaggggtaatcaaatgagcaacatcatagaaacgagacagctgcaaaaatcattcggcagacaacaggcagtggctgatgtgtctctatcagtaaaacgcaacagtatatacggcctgctcggtccgaacggcgcgggaaaatcaacgacacttaaaatattgaccggcatgctgcagcaaacatccggcgaggttctgttcgacggacatacatggaagcgcgaagatttgaaaagcatcggttccctgattgaagcgccgccgctttacagcaacctgacagccgctgaaaatctgaaagtccgctgcgtgatgctcggactgcctgattcaagaattgcggaagtgctggaaatcacgggattaacgggaaccggaaaaaagcgcgccggacaattttctatgggaatgaagcagcgtctcggcattgcgttagcattattaaaccgtccgtcgctcttaattcttgatgagccgacaaacggattggacccgatgggaattcaggatttgcgggaatttatccgctctctgcccggacagggaatgacggttattttatctagccacctgttatcagaagtcgagcagatcgcagaccatatcggaatcatcagtgacggcgttttaggatatcagggagaaatcagccgggaagacgatctggagcggctgtttctggaggttgtcaaatcaacacgggagaaagcggggactgggaaatgattcagtacatgcaggcggaacatcttacatctaaaagaacatttatcagaaagctgatcattcttatcccgcttctgaacacggctttttcttttctgctgaatgccgcctattttatgacgggcacgttcaattggtgggcggttattttcatgccgctcatgattgctctaatgtgcggtttatctgttaaaaaagagaaaaaatcagcgaatgaccgtgcggtgtactcactgccggctgacttgaagagcatatggttctcaaaaataagcttgatcgcgctgtattcactcctgtcgcaaatcgtctttttagtcatcatgttttttcttggccttgtgtttccggcaattgctgcggttcagctgaaaggtattgaagcaagctcccttctgtggctgtctacgctttgggaaattccgttctgcttatggattgccagacagttcgggtttacggcagtgatcctcatgaatatgatcgccgcctttgttttaggcattgtgccggcgtcaggctcattgtggtggctgagtccatggagctggtcagtccggctgatgtcaccgattctcgggatccatccgaacggaattccgcttcctgcaaacagcggcttattaaacggaaacgtgatcattccggctattattctttctattctttcttttatcgcggtaagttttgtttccgccgtgtctttttcaaaagggggaaaccggtcatgaccgtgcttttacgatatatgtgggccgatgtattaaaaatgaagcgtacgccgctcatatggatgcatgctgcggcgccggttttatgcgcgggatttttcctgttgtatatgtatggaagggttcaggagccttatatgctgtacagtgtgtttttcagcgcgattgccgttttataccctttaatcatcagtattgtctgcggcatgtctgcctcggttgaggaacaggcgggccattttcagatgatgctggcggccccgcattctaaaatcatcagttttgcgggtaagctgcttttgctgctcctattgaatgtgttatcggtaggtctcgccatctgtctttatttggcggggatgaaatttgttcttcacatcaatgatctcccgtatcttctctttttaaaaggaggggcgtggctgattgccggcagtattccgctttatatgatgtctttttttgtcggcataaagtacggcatgggaccgtccgggcttttagggggagcgggtttattaatggcggcgctcatgaatacgggacttggcgataccatctggcgttttttcccgtgggcatggagcgtgcggctttcaggccttgcaggactgctgcattttgacaaagtcaaaaaagagttcctcccttatgtaagatacgatatgagattcggagaaataatgttatatttttctatagtgatattatgtctggccggcctctattggtgcagaagatgggaagggcggcgttcatatgaataaaggcaaggagcgattcggccggtggcaaacattttagcaattgatgatgaaaaagatattctcgttctgatcagaaacattttacagcgtgatcagcatacagtaacgattctggaaaaagcggaggatcagtcattggatttttttcaaggctatgatttgattcttcttgatgtcatgatgcccggaacggacgggattgaactctgccggcggattcggccgctggtggacagcccgatcctgtttttaacggcaaagtctgacgaagaatccattgtgaaaggcctcatgacaggcgctgatgattacatcacaaagccgttcggcgtacaggaattgatggcaagggtaaacgcgcatgtcagaagggaacggcgggaaaagcatcagacgaaacggctgatatcaggcttcatgtttgattttgacaataaagaagtatggattgatgaccggaaactgcctcttacgaaaaacgaatataaaatcgttgaatgtctggcacagcataaaaacagaacattctcacgggagcagatttacgaggaagtgtacggcttggacggcgatgcgctctattcaaccattacggagtttatcagaaccatccggaaaaaatgtaaagaacacggggctgatccgatcaaaacggtgtggggtgtcggatacaaatgggaatagcaaaaggaaaatccagcatccgcaaagagcttgtcaaatttacgatcacactgtgtctgagcacgatgggggtggcggcattatgtgtcgccttaaatgccattgctatgaatgccggagcgatcctgcccgcaaactacagcgagcatgaggcggaacagatcaaaccccgcctgaaatcagcggaaaagataacagaagacatgatccccgcaggtatgacatacgccgtttttgataaaaaaacaaagcggatgacaaaaggaacgatgacggaacaagatgcggccaacgcgagaaaaaagattcagcatcagccgtattttaattatgctcaaaaaggattcatggtgataaatcggaaagatgaatacggcgttctccaatattcactcaggtcggaatttcagtcgccgctgttaaggcgctatctgccgaattatgaatggacgggtcttacgattctgatcactttgcttcttttgaccgtttttattgtgacgacgcgtttcgccaatcagctgagacggcatttcagcacactcagctccattacggcaagcattcaaaaacagaatttaaatatcaatccaaaaaggtcgcgtataaaagaatttgacgatgtcattgactctctgctgaaaatgaaagacgcgcttcaggcatctttggcagcgcagtgggaggcggagcggataaagaaagaacaaatcggcgcgcttgcgcatgatattaaaattccggcaacgattattaaaggaaatgccgagctgcttcagttaacaaagcctgatgaggagcaggcggaatatgcgcagtatattctggatgccggaaacaaaatcgagcattatgtcggacagctgatccagctttctaaagcggaggaggcagttgccgttcatgtggaatataccgacctcaaagagtggattcaaaacatatatcgtgacgcggcggcgcttgcggggccgaaacagattgatctcgtcctcagcgaacggggaattgacagaaaagaagcgccgatcgatcatgagctgctccacagggcggtcatgaatatcgcggcaaatgccgtcgactatacgccggaaggaggggaaatccgtgtggacgtcctgtgcaccgattccgccctccatctcgccgtatccgacagcggaagcgggttctcgccggaagcgctgaaaagagcgacacagcttttttacacggaggataaaagcagacattcggcggggcatcacggcatggggcttacattcgcccatcatgtcgtacatcttcaccacggcgaattaatacttgaaaatcaggagtctggaggagcccgggcggagattcgaattccgctggaaggcgtcagacaaaaacaagccctgcacgcctgagggcttgtttttctgtttaagaaaagcaaaaataaaaacggctgtccgtttgagagatcagccgcttatgcggaaaagagtttatcaggaaggatcaatccatgttgaagaccacttggaaatttcctctaaaataggggctaatgcgcagcctttttccgttaaagaatactcaatgcggacaggcgtttcggggataacatcccgtttgatgacaccttctgtttcaagttctttcagacgttctgacaagactcttccgcttaaattcggaagcgccgcttcaatttcgctaaatcgctgctgtccgttcaataactgaaagacgattagagccacccagcgtttacttaggatgtcgaccgctttttcgaatctggggcacatttctgattggttcatgctttttcacctcgtcttctgctattataccgcaaaatcggagggaacgtacgtctggcgcttgttaagttgaggagaggatcaaaaagaggatgaggaatccggggagcgctttttcgcttcagccgcgataaaatcaaagtatttgctgacgctttcaatatcttcttttgtgaagtgctgccactttttgctgtcaaacagcggcagatgctccgcgcctctgtcaacggcggtctgatagatggcgcagatggattgatagctttcggaggtttcgcggatttcttcctgaaatgccttgatgtgtccggcccgcgccattaactcctcgtacggaatttttaatgtgtccgccaattttcggatggtcgcgggtttaggaatgccgcggtgcccgttttcaattctggaaatggtcgccgagctgacgccggaatagacggcaagctgattgacggtaagcttccgggcgcggcgcagctctcttaattgctttccgaatgtgttcaataagatcgcctcacatgtgcaaagtcatgagtcttcatttgttctttttttggcttcagccgataagaacgcaaagtatttatcaagcagaaccaagtcttctttcgacaggtgccgccagttctcccgctccaatagggataaatcatgcagctcatacgtttcggctttttccagcaaggtgcagcccgtgtcgtacggggctctcgtttcctggacggtctctatgtatcccgccgtctgcatcagttcctcatacgggatttttaacgcatctgcgagctttttaatggttgcaggtttcggcaccccgcgtttgccgttttcaatccgcgagattcccgcggcgctcacgcctgaatacgttgccagctgattcactgtcagatgccttttttcccgcaatgtccgcaattgtttcccgaagctttccacagtctctccccctcccgcggtctatttatattctagtatgtttattgactaaagggaatagccaggctggaaaagtattgacaaaagttaacaaaagccgtatcttatgtataagaaagaaagtatttgacagaacggaaggtgaagaaagtggtcgaaaagatacagatcagaagagattatgtgctgcagtatatggtcaataatgactactcgttaaaccagctcgccctggagatcggaatatctcccgccacactgagccgtgtactgaatggagagcggaggccgggccagctggtcatcggaaaaatgctctattactttgacatgaaatttgaagatcttttttactacgactttgttgacaaaagtcaatgatgatggaagattcaaacgcatttccgtttttctgacatgatgtgcaccgatacggcgtgacatgcctttgtttttcatgtaaaatagaagcaatgtaggccagtcagtctggaggtgtatgggatgcacacattattgattaccttattggtcatcgtcagtattgcacttattattgtcgtattgcttcaaaccagcaaaagcgccggtttatcgggtgcaatttcaggcggggcggagcagcttttcggaaaacagaaagcaaggggccttgatctgattcttcaccgcacaaccgttgtgctggcagtcttgtttttcgtgttgacgatttcgctggcgtatatcgtataaggcaatgtttgtataaggtctgatttaatatcaggcctttttcttgttgagagacggcgtttgtttctcgcaaaactgtggaaaactaaattgaatgtgcaaaaaaggggttatgagcatgaaaattgtgacaccaaaaccatttacatttaaaggcggagacaaagcggtgcttctgctgcacggatttacgggaaatacggcagacgtcagaatgctcggccgctacttgaatgagcgcggctacacttgtcacgcgcctcaatataaagggcacggcgttccgccggaagaactggtacatacggagcctgaagattggtggaaagacgtcatggacggttatgaatatttacggtctgaaggctatgaaaacattgcggcctgcggactgtcgcttggcggggttttttcattgaaattgggttacactgtacccataaagggaattgttcctatgtgtgcgccgatgcacattaaaagtgaagaggttatgtacgaaggagttctctcctacgcgcgcaattataaaaaattcgaaggaaaacagccggagcagattgaaaaggaaatgaaggagtttgaaaaaacaccgatgaatacgctcaaatcgcttcaggagctgattgccgatgtgcgcaaaaacgtcgacatgatctattccccgacatttgtggttcaggcacggcatgaccatatgattaatacagaaagtgcgaacatcatttacaacgaggtggaaacggacgacaaacagctgaaatggtatgaagaatcaggtcatgtcattacgctcgataaagaacgggacctcgttcatcaggatgtgtacgaatttttagagaaactcgattggtaacaaacaggaggtcgaataatggaaaaagaagcgtttatggaccgtcttctcgcgtttatgaaggaagaggcgtacaagccccttaccgttcaggaactcgaggagatgctgaacatcacggaagcagatgaatttaaagagctggtaaaagcgctggtggcgctcgaggagacgggacagatcgtccgcaccagaagcaaccgctacgggcttccggaaaaaatgaatttagtaaaaggtaaaatttccgcgcatgcgaaaggattcgcgtttctattgccggaggatacctctttaagcgacgtgtttattccgccgaatgagctgaatacggccatgaacggcgatatcgtcatggtgcggctcaattcccagtcaagcggatcaagacaggaaggcacggtcatccgcatcttggaaagaagcatcgaccgtgtcgtgggcacatacacagaaacgaaaagcttcggctttgtcatcccggatgataagaaaatcacgagtgatatttttattccgaaacatgccaataacggcgctgcggaaggtcataaagtcgtcgtcaaactgacaagctaccctgaaggcagaatgaacgccgaaggagaaatcattgaaatactcggccataaaaatgatcccggcatcgatattttatcaatcatccataagcacggcctgccgggagattttccggctgaagtgatggagcaggcaacaagcacgcccgataccatcgatgaaaaagacatcaaagaccgccgtgatctccgcgatcaggtcattgtcaccattgacggcgcggatgcgaaggatctggatgacgccgtcactgtaacaaagcttgataacggcagctacaagctcggcgttcatattgccgacgtcagccattacgtcacggagaattccccgattgacaaagaagcgctggatagagggacaagcgtgtacttggttgaccgggtcattccgatgattccgcacagactgtctaacggaatctgttctttaaatccgaaggtcgaccggctgacgctttcctgcgaaatgacaatcaaccagcagggccaggtgacagagcacgagatcttccaaagcgtcattaaaacgacggaaagaatgacctattcagatgtcaaccggatcctcacagaagacgacgccgagctgaaagaaagatatgagccgctcgtcccgatgtttaaagacatggaacgtctggcggaaattctccgggcgaaacggatggaccgcggcgccgtggattttgatttcaaagaggcgaaagtgctcgtcgatgaggaaggcgccgttaaagacgtcgtcatcagagagcgctcagtagcggaaaagctgattgaagaattcatgcttgtggcaaacgaaacggtggccgagcacttccattggatgaacgtgccgtttatttaccggattcacgaagagccgaacgccgaaaaactgcaaaagttcttggagttcgtcacgacattcggttatatcgtcaaaggaaaagccggagacattcatccgcgcgcgctgcaaagcattcttgacgaagtgcgggaccgtccggaagaaacggtgatttcaaccgtcatgctccgttccatgaagcaggcgaaatacgacccgcaaagcctgggccatttcgggctggcgactgaattttatacgcacttcacatcgccgatccgccgttatcctgacttaatcgttcacaggctgatcagaacgtatttgatcaacggacaatcggacgaagcgactcaagaaaagtgggccgaacgccttccggaaatcgctgaccatacgtcaacgatggaacggcgcgccgttgatgcagagcgggaaacggacgatctgaaaaaagcggaatatatgcttgataaaatcggcgaggaatttgacggcatgatcagttccgtcacgaatttcggaatgtttgtcgagctgccgaatacgattgaaggtcttgtgcacgtcagctttatgacggatgattattaccgttttgacgagcagcatttcgccatgatcggcgaacgcacgggcaacgtttaccggatcggagacgaaatcacggtcaaagtcgtcgacgtcaataaagatgagagaaacatcgactttgaaattgtcggcatgaaaggcacccgccgtccgagagaaacgacaggcgaccgcagaaaacgcggcagaccggcgcggaaacgcgtgttaaacagcaataccccggcttcaccgccgaaatcggaggaaaaaggggaatggtttacaaaaccgaagaagaaaaagaaaaaacgcggtttccaaaacgcgccgaaacaaaaacgcaaaaagaagaagtaaatgcgaaaagcaaatggggcaaaatgctctgtttgctttctttcgcaagccgcattttcattgtcgcggaacgctccatttgctaaaataaagcgtatcgcacacatgaacggtttttgcggagagaggaggataaggcatgccaaaaggatcaggcaaagtattatcgcaaaacaaaaaagcaaaccatgattactttatagaagaaacctatgaaacaggcatcgtgctgcagggaacagagattaagtccatccgcgccggccgcgtaaacatgaaggattcctttgcgaaaatcgagcgcggcgaagtgttcctccacaacatgcacatcagcccgtacgagcagggaaaccgctataaccacgacccgctccggacgagaaagcttttgatgcacaggaaagaaatcaataagctgatcggcctgacaaaagagaaaggctattccctcgtgccgctgaagctgtatttgaaaaacggctttgccaaagtgctaatcggcctcggaaaagggaagaaaacatacgataaacgtgaagatttaaaacgaaaagacgccaaaagagaaatcgaaagagcgttcagagacagacaaaaaggcttctaatgcctgagccttgatgtgataactgccgtatgctatactgttcacacatcaaattcacaggctgtttattgaagacattcccaattgaatttgtctgtgatcatgatataataacagtacagccagttaagcaagagcttgatagatctcccgtatacccttaacaaggggacgttacggattcgacagggatggatcgagcttgagctgcgagccgagaggcgatctcgttaacacgcacctaaatataactggcaaaactaaaagttttaaccaaaacttagcactagctgcctaataaacgcagcgagctcttcctgacattgcctatgtgtccgtgaagagcacatccaagtaggctacgcttgcgttcccgtctgagaacgtaagaagagactgacagactagctctcggaaggcccgcccgcaggcacgaagacgagtgaaacacgaaatatgcaggctacgctcgtagacgcttaagtaatcgatgtttctggacgtgggttcgactcccaccgtctccatacataacagaggaaccgcagtgccgtcacttgaccgcactgcggttttttcatgccgaaataaaggagtccatttgaatgatagtcgtcattatagacggaaaagatattacaagcacagaagcattacaccgaatcttaaaagatcaattagatttcccggacttttatggcgaaaatctgaatgccttatgggattgtctgacaggctggatcgaatatccgctgactttggtgtggaagaattttgaggccagtcaaaaggcattgggttcggatgctgatgatgtattaaggatattataaaaggcgcaggcagagttagatggtgaatttttcattcaaattgagcagccgtcagccgggacaacggacaggcactaaaaagtgcgtacttcccctcatctatttttctatccgataatagggacggaaggtttcaggctttcgatttcagtccatatataagaagagacttgcgatagggaggaatggatgatggatttgcagttgaaagggaagacggcgcttgtgacgggatctacgtcaggcatcgggaaggcgattgcggcttcgctgattgcagaaggtgcggctgtgatcattaacggacgccgtgaagaaaaggtgaacgaaacgatccgggaactagagaaacagacgccggatgcccgtctctatccggccgcatttgatttaggcacggcggaaggatgcggcgcgatttttcagcagtatccggatgtggatattctcgtcaacaatttaggaatctttgaacctgcggaatactttgatattcctgacgaagagtggctccggtttttcgaggtgaatatcatgagcggcgtgaggctgacacgccggtatgcaaagcggatgattgaacggaaggaagggcgggtgatttttatcgcgagtgaagcggccgtcatgccttctcaggaaatggcccattacagcgctacgaaaacaacgcagctgtcgctgtcacgcagcctggccgaactcacggaagggacgaatgtgacggtgaatacggtcatgccgggctccacgaaaacagagggcgtcgaaacgatgctggagtcgctttatcccggtgaaaacctgacagcggctgaagcggagagacgatttatgaaggagaatcgtccgacgtcgatcattcagcggttgatccgtccggaagaaatcgctcactttgtcgcctttttaagcagcccgctgtcgtctgccattaacggatctgcattgcggatcgacggcggcttggtgcggagcattatataagatgaacgtacaaaaacccccgtaaagcgggggtttttttaatgcggatcacgctgaaaccggccgatgatcctgctgattaaatcttttgtggcagagtcaaaatgctcttctttctggtttgtcaacagcccgaccggcggtgaaattgttaagttacggatcggaatgaccttcgtgccctcgatcggttctgagtgcgccgtcgccgtaaagattgagacgccgatattttccctgacatagtattggtgagccatgctgctggtcagctccatttttcgatagcggctgccgatggcccgctgcaggtgctgttcaatttgaatccggatcgggcaattggcgggcgtgaaaatcaggcattcattttctaaatcctcgagattgacgcttgctttggcggcaaggggatgtctgtctgacacgatgacattgagcgagtcatgaaaaaacggatcgaaataattctccagaatcagctccggctcgccgcatacggcaaaatcaatggcgccctccagcagtttgcggctgcatgtattggcatcatccacgctgacattgaccgacatgtcaggataatcatttaagaacccccgcagtacggcagggaagatcaggcttgccgtcggttcggatatgccgatgtgaataaggccggcctggccctgtctgatgtcggccagagtatggtcaagcacctcgtattgcgcgagaagctgcccggcccgctcatgaaacagccgccccgcccttgtcagcttcagcttctttccccgttcaaacagctgagcgcccacatcctgttccagctgtttaatccgcattgaaatcgtcggctgtgagtagttcagaatttcggcggctttataaaagctgcctgactgtacgatcgtatgaaacgttttaatggtgcgtaattccaacgaaatcccctcccggctgttcattaattttcttgaacctttcctttactttttttgattagtcaaataaatcagtttgctttatagtataaacaatcaaagcttagtaaacaaattggaattatatatttttgcggggagagtgaccggaatgagtgaagacatatttcgattggctgagaaaaaggatgcaccggagtttttagagctgctgtacagcgcgtttcagccgatccgcaatttggagattgactggccgtcggcgcgggccgacatcgatatggtaacagaaaatattgaaaatcattcagccgtcgtgctcgaacgggacggacggattctttcaaccattacgatccgttttccgtgggagagtgacacgcctccgtcaaaatatccgtttgtctggtggtttgcaacgcttcctgagctgaaggggcagggcatcggcagcaaacttttgacttatgtggaggaacacgtgctgcgggatacgctgaaggccccggccatcacgctcggcacttcggcgcgcaagcatccctggcttgtagatatgtacagacggagggggtatgaagtgtattttgagcaggagaaagacggagacatcggagtcatgatgagaaaggtgctcataccggagcggtttgacgcgtcgctgttaggcacaccgagctgggcgcaatgataaaaaaacggatcagagccggctgtctgcttctgctgctcggtgtgctggccgggtgcgggcaaggagaaagcacaaaagcggggagcggcgtgcagaccgtcattgtcggcacgggaactgattttccgaacattgcttttatggatgaaaaaggcgagctgaccggctatgacattgaagtgataaaagccattgataaacagctgccgcaatacaaatttgtctttaagacgatggatttttcgaatctgcttacaagtctcggaaaccggaaaattgacgtgatcgcgcacaatatggcgaaaaataaggaacgggagaaacgctttttgtatcacaagatcccgtataactactcgccgatgtacatcacggtgaaggcggataatgacgcgatacacacgctccgggatttaaaagggaaaaccgtcatcgtcggcgcgacgtcaaacgcggcggattatatgacggcatacaacaaaacccacggcagcccgatacatttgaaatacgccgggcagggcagcaatgatacagcaaaccaaatggagacgggacgcgctgacgccaccgtatccacgccgtttgccgtcgattttcaaaataagacgcacgcgttcaaacaaaaaacggtcggtgatgtgctgctggataccgaggtgtattttatgttcaataaaaacagccaaaccctggcggacgatacggatcgggcgattcaaaagcttgagaaggacggcacattgaaaagactgagtgaaaaatggctcggcgcggattattcaaaatcaagtttcacgaaataattgaagcagaaaacggggcgatcacatgaaaataagattggcggtcatgtcattaacaattgccgcaacggcggcgttatcagcctgcggcgcgggagggggggcggcatcaggcaatcagaaaaacgtgaagaacattacggtcggcacgggaactcaatttccgaatatttgctttattgatgataaaggcaaattgacgggctacgacgttgagctggtgaaagagcttgataggcgcctgccggactatcgtttcacttttaaaacgatggatttctccaacctgcttgtcagcctcggccagcataaagtcgatatcgtagcccatcaaatggagaaaagcgccgaacgggagaaaaaatttctgttcaatcaagtcgcgtataacaacttcccgctgaaaatcacggtgcttcaagaaaacgggaacattcacggcattgatgacttgaaaggaaagcgggtcattacaagtccgacgtcaaacggcgcgcttgtgctgaaaaaatggaatgaaaaacacggcagtccgtttgaaattgcttatgccggccaaggctccaacgatgcggccaatcagctgaaatccggccgcgccgatgcgacgatttctacgccgtttgccgtcgatttccaaaacaaaacgagcgcgatcaaagaaaaaacagtcggcggggtgctgtcaaatgccaaagtgttctttatgtttaacaaaaatgaacaaacgctgagtgatgacattgataaagccctgcaggaaatcattgatgacggcacgcttaaaaagctgagtgaaaagtggctcggcgcggattattcaaaggagcaatattaagtgaaaaagagagggatcggcaatggaaaaagcgtttgatatcagtatgatcgcgtcctttgtgccgacattgctcgggtatttgcccgtcacgctgtatatattggcggtgtctctgctgttcggctttctattggggctgcttttggcgctgccccgcatctatcgcattcccgttttgaatcagtttgcgaagctgtatatctcttttttcagaggaacgcccatcatggtgcagctgtttattgtgttttacggtattccggcgctcacggcgctcgccggaattgatacctccaaaatggaccctttgtatgcggccatcgccacgtacgcgctgagcagcgcggcaagagcggccgaaatcatcaggggaggtgtgaacagcgtcgaccgcgggcaggcggaggctgctttcagcatcgggctgaacggggggcagacattccggcgcatcattctgccgcaggcgcttgtgcaggcctttcccaacatcggaaatatggtgatcggtttcttaaaagatacatcactcgctttttcgatcggggtgatggatatgtcgggcagaggacagaccttgattacatcgagcaatcattctttagaagtgtatatctcgctttctgttctgtattatgcggccgcccttttatttgaatgtgtcttcagatgggccgaaaaacgaatcaagaaagatgagacgcgccttgtaacggtttttgacatgagcgcgcacggctgaaaaggagggagaacagtggagctggatattccatttatcggcactgcgatcaaacaaatgatgaaaaccgttccgcttacattggcaatgacggtcattccgattattgccggatttttcatagctctcggcaatatcacggtgcgtatattccgcatcaaatggctgctggcctgctcatcgttttacgtgtcttttttccgcagcaccccggcgattctccatattatgctgatttatttaggggttccgctgattgccgatcaattcagccgcgcgtttcatctcggctggtcggccaatcagattccggtcgccgtgtttgtcatcatggcactgtcattaacggcaggcgcttatatgacggaaattctccgttccgggatcatggccgtcgatacggggcaggcggaggcggcatattcaatcggcttgacgcggggccagatgattcggcgcgtggttctgccgcaggcgttcatgatatcgctgccgaacttcaccaacataggcatcggctttttgcataccacttccatcgcggcaattgttgcggtgcctgaaattacaggaacggcgacgattgcggcatccgataactatgcatttctggaagcatttatcggggctgccgtgatttattggggattaacgctgattctcgaagctgtaaacagtctggcggaaaaaagggcggccagatatcaaggaggcgcattatgatcgaaatccgaaacattcagaaacattttggcagtcatcacgtgctaaaggggatcaatttaagtgtccggaaaggagaagtcgtgaccatcatcggcccgagcggttccgggaaaaccacttttctgcgctgccttaatttacttgagcggccggatgagggcgccatttcgctgcacggtgaagtcattaactgcaaaaagcctgccaaaaaagacattctcagactgaggaaacagacggcgatggtttttcagcaatatcatttgttttcgcataaaacggcgattcaaaatgttatggaaggcctgacggtcgcaaggaaaatgaaaaaaacagatgcgtacgccattgccgagcgggaactggccaaggtggggcttcaggataaattgaacgcctatccgaatcagctgtcgggaggccaaaagcagcgggtcggaattgccagggcgcttgccattcatcctgatgtgatgctgtttgatgaaccgaccgcagcccttgatccggagcttgtcggcgaggtgctcgaggtgatgcttaacattgtgcggaccggcgccaccatgatcattgtcacacatgaaatggaattcgccagaagagtgtccgaccgaattgtgtttatggatgaaggagcaatcgtggaacaaggaacgcctgaggaagtcttttacaagacgaaaaaagaaagaacgaagaagttcctccgccgcgtgctgcctgattacggttatgacataaaagagcgcataaaggagcctgtcgtatgattcgtttaagcattttagaccaaagtgtcaccgcggaaaaccaaaccgcagaagaagccttgcggcaaacggtgagattggctcaggaggccgaacaatacggatatgaccgtttctgggcggcggagcatcataacaatgaagagatagcgggatcagcgccggaaattgttctggggtatcttgccgcaagcacgaaaaaaatccgtctcgcgtccggcggggtgatgctgcagcattacagtccttataaagtggcagagcagttccgggttctgtccgctcttgctcccggccgtgtggcgcttggtgtcggcaaagcgcccggcggatttcagctgtcaaccgatgcgctgcagcgggagcttatccagcccgcccgtttatttgaagaaaagcttgaggagctgactcatttcatccgaaatgattttccggactcgcaccgctacgcgtcattgcggccggcgccgcatactgagtatgcgcctgacctctttttgctcggcggcagcgcggaaagcgcgatatccgcggccaaactcggcatttccttcgttttcgcctatttcataaacggtgaagaggctgcgttagaaaaagcgcgccacgcctttgacgagcatctgccgaaagggtctaaggcggaatttcaccttgcgccgatggtctttaccgcgcatacaaaagcagaagcggaaaaacacgtggtatcgcgtgagtcggtcaaaatcattctcgaagacggcaaaaaggtgaatgtcggttcccgggaacaagcggaagcgtttcttgaacaagtcacgcagccatacaagctgattacacaaaagacgggtgtgattgccgggacaaaagaagagactgccgccgagctgcgacgattatccgttccgtacagcattactgattttgtgattttgtcgcctatcaaaaacgctgaggaaaaacgattgtcttaccggctgttaagcgaagcggtgcagccggccccacaattataggagggatgaacatgagtcatgaagtaaacgtagtggtctggagcaaacagggctgctcctattgcgatgaagtgaaaggatatttgcgggaaaatgccgttgcatacgaaacaattgatgtgacagagcgggacgaattgagtgacgtgctgcagacgaagtacggcatccgtcatgttcccgtcgttgaaatcggcagcggtgacagccgtgtgtatcaggccgttactcaagtcggcattgaacatgtagaacgggcgcttgctgattacgaggggaaaaagggggagagaaaatgagccggacagatcttattcaattcggagccatgattcacggtgtcggcggcacaacggacggctggcgtcatcccgacgccgatccgacagcaagcacgaatgcggcgttttacaggcaaaaagcgcagactgctgaaagagggctgttcagctttgcttttattgcggacggcttgttcatttctgaaaagtccatcccgcatttcttaaatcggtttgagccgatcactatcttatcggcgcttgccgcctctacaacccatcttggtttaatcggcacattttccacatcgttcactgagccgttcaccatcgcaagacagctgatgtctcttgaccatatcagcggcggccgggcgggctggaatctcgtcacctctccgcaggcgggagccgcgcgcaatcacagcaaagaaagccttcccgaccacagccggcgctatgccatcgcccaggaacatgtggacgtggtgcgcggtctgtggaattcctgggaagaagatgccttcgtccgcaacaaagaaaccgggcagttttttgaccctgacaaactgcatcgcctgtatcacaaaggcgagtattttcaagtggagggcccgctgaatatcggccggtccaaacagggagagccggtcgttttccaagcggggtcttcagaaaccggccggtcgtttgccgcgaggaatgcagatgcagtctttacgcactccaattcacttgaggaaacgaaagctttttatgatgatgtgaagaagcgggcggcggattacggccgggacgctaccaagctgcggatctttccgggaatcagtccgattatagccggctcacaagaagaagcggaagcgaaataccaagaattcgccgagctgattccgatagagaacgccgttaaatatgtggccagattttttgacgattatgatctgagccgttttccgctggatgagccgtttcctgatttgggcgacgtcgggaaaaacgcgtttcaaagcacgacagaccgtatcaaaagggaggcgaaagcccggaatcttacgctgcgtcaagtggcgcgcgaagccgcgtttccgcgaacccattttatcggcacaccggaacatgtggcatcattaattgaaacatggtttcagcgggaagcggcggacgggtttatcattcactctgacatccccggcatgcttgaagcttttgtggatcatgtcataccgatcctccaggaaaaggggctgtaccgaaaaagctatccggcggatacactgcgggggaatctcgggttggatattccggtctgtaaatcaaatccgatgttgagcagaaactaaatgtttctgctttttctgctgcttgccattcccgtcattacagccttttcaaaaaaatacactgatttcgagatattattgttgcgaaaagatttttttgtaactataattattacagaactgatcagtataaaaaaacattcatatttcataataaatgtgtgtgtaatctgaaaacgaaagggctgtttacaatggcaaaagtactttatatcactgctcatcctcatgatgaaaagacatcttacagcatggcgacaggaaaagcgtttatcgattcttataaagaatcaaacccgaatgatgaggttgtacatatcgacctttacaaagagaacattcctcatatcgatgcggatgtattcagcggctggggaaaacttcaatccggcacaggttttgaagagctttctgaaaacgaaaaagcgaaagtcggccgtctgaacgagctgagcgatcaattcgcgtcagctgacaaatacgtattcgtcacaccactttggaacttctcattcccgcctgttatgaaagcgtaccttgattctgtggctgtagccggaaaatcattcaaatatacagagcaaggcccgatcggtctgttgacagacaaaaaagcgctccatattcaggcgcgcggaggctattactctgaaggaccggcggctgatatggaaatgggccaccgttacatcggcatcatgatgaacttcttcggcgttccttcttttgacggattaatcgttgaaggccataatgctgaaccgaataaagcacagcaaattaaagaagatgcgattgcccgcgcgaaagaagccggaaaatcattctgatcttaaaaaaacctccccgccgtacggctgggaggtttttcatattaaagggcaatcgtccgtttttgttcgctgcttttcatcgccgcttcaatgacacggatgacatcgatgccttcttttgccgtaacgggaagcggttttccgtttaagatgctgtctgccagcagtttgtagtacgtaaggtaagagccgttctcagaggggattgtttctgtatgccgtttttcatccgctgcgattgtcagttctccgaagttgtcagggtcatcggcgccccagctctcgtcaatcggcttttgtccggctgaaagcgcatcttcctgtccatccattccgtatttgataaagcttgcattccgtccgtgaatctgatagcgcgggccgcttgccgcattcatggagccggattgaagaatgacctgaagtttgccgtaatggagcgcggccagaaaattatcaacggtttcactgttgtcccgctgtttcatcacatgtgcggtgacggattccggcattccgaaaagcagaagtgtctggtcaataatatgtgaaccgagatcatacagcgttcccgtggcgggtccgttcatttcgcgccatttttcctgtacaaccgggttgtatagatcgtagctgacttgatatgtatgaatgtcttgaagcgccccgtcccgaatcagcttttgtatcgttaaaaagtcattgtcccagcgccggttgtgatacacgctcagcaagacgcctttattttcagccgttcttctcagctcctccgcttctgctgaagtcgccgtcatcggtttttccacgacggtgtgttttcccgccaggagacatttcatcgctgattcataatgcattccgctcggtgtcgtgacgatgacgagatcaatgtcaggatcaccggtaatgtcttcaatcgcgcgcacggcttcagcccccggcagatcacgtttgacctcatccgttctggacgtcatgacttttttgatctgataatcatcaaggacgtccaaaagcggcgcatgaaagactttacccgacaaaccatatcccaatatgccaacttgtatcgttttcaatgaatttccccctcttgatatgtgataacattatataccccgcgggtgtactggtaaaacttgtgtgttgaaaattttttacaccggattttcaagtctgtataatgaagataacgaagaaaaaaaccgaggtggaaaatggacaaacataccgagcatcaatcgttaaatcataaaagcgccaaagaaaaagaccagatcctgaaccggctgaaacggattgaaggccaagtcaggggcattcagaatatggtggataacgaacgatactgcgtggatattctcgtacagatttcagccgtacaggcggccatgcagaaagtcgcgtttcatctgctggaagatcacgcccatcactgcgtagccggcgccattgagagcggaaacggggagcaggcgattgccgagcttcttgatgttgtgaaaaaaatcgcaaaatcgtaaaataaaatgttttgaaataccctacaggggtatggtaacatgaagaagaaaaaacaagacgtggagggaatcatcatggaacaaaaaacactgcaagtcgaaggcatgtcctgtcagcactgcgtcaaagcagtagagaccggagtaggagaactgaacggagtgacggcggttcaggtgaaattggaagccggacaggtggatgtgacgtttgatgagaacaaagtctccgtatcagatataaaagacgcgattgaagatcaaggttatgacgtcgtataggatttatcgcgctgcggaaacgggcgcggttttcttttatcatacttatacccccatggggtttatgaagagagatgaggacattgagtgaaccgaaagaaatgaccattcaagtggggggcatgacatgcgccgcctgcgcttctagaattgaaaaaggactgaaacggatggacggcgtcaatgacgcttccgtcaatcttgcgcttgagacctcaaatatttcctatcagcctgacaaaatcgaagctggcgccataaaggataaaattgaaaaactcggctaccatgttgtgacggaaaaagccgagtttcagattgaaggcatgacgtgcgccgcttgcgccaatcggattgaaaagcgcctgaacaaaacagagggcgttgtgggcgcgccggtgaatttcgcccttgaaacggtcaccgttgaatacaatccgaaagaggtgacaccgaaagagctgaaagagaccgtggcaaaactcggctacagattagacgagaagcaagcggttgatggaggcggcggattatcccaaaaggagaaagagcagcgaaaacagctgatcaggctgatattttctgccgttctctcatttccgcttctatggtcgatggtcagccatttttcttttacttcttttatctggatgccggatatcctgatgaatccgtggctgcaattcgcgcttgccaccccggtgcagctcgtcatcggctggcctttttatatgggagcgtataaggcgctgagaaacaaaagcgccaatatggatgttctcgttgcgctcggaacgacggccgcttacgcatacagcctgtacatgacgattgcgtctctcggacgagacggacatgtagaggggctttattatgaaacgagcgccattttgctgactttgattttgcttggaaagcttttagagatgaaagcgaaaggccgctcatcagaagcgattaaaaagttaatgaagcttcaggcgaagacggcggcggttgagcgggaagggaaggtacaggtgattccgattgacgaggtccggacgggggatatcgtatatgtgaaaccgggagaacgtgttcctgtcgatggcgaagtgattgaaggccattccgcaattgatgaatcgatgattacgggggagagcatgcctgtcgataagtctcccggaagcaccgtcaccggggcgacgatcaatgcaaacggctttctcaaaatcagagcggtgaatgtcgggaaagataccgcgcttgcacacattattaaaatcgtggaagaagcccaaggatcaaaagcccccattcagcggctcgcagatcacatttcaggcattttcgtcccgattgtgctggggctggccgtgctgacttttctcatttggtatgtatgggcggcgccgggacagttttctgaagcgatcggcaaattcatcgccgtgcttgtcattgcctgtccgtgcgcactcgggctcgccactccgacgagcattatggcgggctccggccgcgcagctgaattcggcattctttttaaaggcggagagcatttagaaaaaacacagcgtctgacgaccatcgtactggataaaacaggaacggtgacaaacggcagaccggttctgacagatgccgtaccggcagagggaatgaacgaagaggaactcctgcggctggcggcggccgccgaaacgggatcagagcacccgcttggagaagccatcgtgtcaggagccgaaaaacgggggattgccatcccaaaaatcacccggttccaagcccggatcggttcgggaatatacgccgaggctgacggcagaacgattcttgccggatcaagacggctgatggaatcagaacacatcgaacatgaggcgctgcttcctcacatggcccgcttggaggcggaaggaaaaacggtgatgcttattgcggcagacggcaaagcggcggggcttatcgcagtcgccgatacaatcaaagacacatctccggccgcggtgaaacgcctgaatgatatggggcttgacgtcatcatgatgaccggtgacaacaaaaagaccgcggaagccattgcaaaagccgcgggcatcggcagcgtgatcgccgaagtgcttcccgaacaaaaggcggcggaaatttcccggctgcaaaaagaaggccggcgcgtggcgatggtcggtgacggcatcaatgatgctccggcgctggctgtggccgatatcggaatggccatcggcaccggcacagatatcgcaatggaagcggcggatattacgctgatccgcggtgacctgaacggcattgccgacgccatcggcatgagcaggctgaccatgagaaacatcaagcagaatttaggctgggcattgggatacaacagcatcggcattccgattgcggcggccggctttctggccccgtgggtggcaggcgctgccatggcgttcagctcagtatcggtcgtccttaatgctttgcgtttacagaaggtaaaaaaagacaaaatgggctgatgcctgttttgtcttttttattgacactttattcaaagcctgcatataatagagaaaacaaatatatgagtatatgttcatatatataaattcgtttagctgtattgatgttatgggaatcctattacggaaagtagggtgagtcgaaaatgaaagcagccaaaggtgaatttgtattagacggacttgattgcagcaactgtgcaaaaaaaatagaaaacggcgtaaaagccattgacggcatagacggctgtgctgtcaattttgcggcaagcaccatcacggtctcagccggcggcaaaaacgagcaatggatgaaagatgaggttgcgaaaaaagtaaagtccattgatcctcatgtgaccgttcgttcgaagcacgaagacaaacccggcgaggatgaataccgcaaaaagctgcagctgatgttagtgaggttggctgcgggagccgttttggccgtcatcgcttacttcgcgcacacgggcgccgtccttgagtttctgctcttttttgcttcgtatttgatcatcggcggcgatatcgtagccagagcgggaaaaaacattgtccgcggccaggtatttgatgagcattttctgatggcgcttgccacgatcggcgcatttatgattcatcaatatccggaaggcgtcgcggtcatgctgttctaccaaatcggtgaactgtttcagggagcggccgtcagccgatccagaaaatcgatcagcgcgttattggacatccgtcctgagtacgccaatgtgaaaacggaaaacggcatgactgccgttccgccgcaggacgtcaaagtcggacaggtcatcgtcgtgaatcccggagaacggattccgttggacggaaaggtgctgagcggttcttcgatggttgatacatccgctttaacgggcgaatccgtgccaagaaaagcggagccggggcaagatgtgatggccggatttatgaatcagaacggcgtgcttcatattgaaacctctaaaggatatgaagactctgccgtgtcaaaaatattggatctggtcgaaaatgcggccggacgcaaagcgaaaacggaaaactttattacgaagtttgccaagtattatacaccggccgttgtcattgttgcggtgcttctcgcctttttaccgccgcttctcgtgccttcagccgcgctatccgactgggtgtaccgcgcgctgattttccttgtgatttcttgtccgtgcgcactcgtcgtctccattccgctcgggtttttcggcggtatcggagctgcgtctaaagcaggggtgctcgtgaaaggcagcaactatttagaagcgctcaatcaggtggcatacgccgtgtttgataaaacgggaaccttaacgaaagggaatttcgccgttactgatatcaaaccggcggcagggtttacgaaagacagcctgcttcatgcggccgcgcttgcagaagcccattccaatcatccgattgcttcttccatccgtgaagcttacaatcaaccgctctcggctgaggagattgaagaatatgaagaaatacccggacacggcattcgggtgaaaaccggcggatcaacgattttagccggaaatcaaaaactgatggcaaaagaacaaatcgcttccggtacagctgaaaacaacggaaccgtcgtctatgtcgccgttgatcagcagtatgcgggggcgatcgtgatcgccgatgaaatcaaagaggacgccaaacaggccattgccaatttaaaagcgctcggcgtgaagcggacagtgatgctgacgggtgattcaaagcagaccggagaagctgtcggccgagagctcggtattgatgacgtgtacacagagcttttgccgggtgacaaggtagaccgcgtcgaagaacttgaagcggcgcttttaccgaatgaaaaactgatgtttgtcggcgacgggattaatgatacgcctgtgcttgccagagctgacatcggagctgccatgggggctctcggctctgatgccgccgtcgaagcggccgatgtcgtcctgatgacagaccagccgtcaaaagcagccgaagccatccggattgcacgccgaacacgccggatcgtctggcagaacatcggatttgctttaggcgtaaaaatcatttttctcctgcttggcgcattcggattcgccaccatgtgggaagcggtcttttcagatgtaggcgtcacgctgatcgccgttgccaacgcgatgcgcgtcatgagagtgaaagcggaataattgtcaaagataattcgtttttcagggttttcttaaacaaggttgtcttggtaaaatagagaagcgggccatccggcatccgcttcttttttattttaaaaacaatgaggtgtctgagtgaaaaagaaacaatcgtctgcgaaatttgcggtgattctgacgttaatcgttgtcgttttatttgcggccatcgtaattattaacaaccaaacggaaaaagcgggcgaaacagtcgccgaacagccttccattaaaggacagcccgtgctcggcaaagacagcgcccctgttacggtagttgaattcggagattacaagtgtccgtcatgcaaagtatttaacagcgatatctttccgaaaatcaaaaaagattttatcgataaaggcgacgtgaaattttcatttgtgaacgtcatgtaccacggaagcggctcgcgtctggcggctcttgcttcagaagaagtgtggaaagaagacccggcatcattctgggcattccatgaaaagctgtttgaacagcagccgtcaagcgaacaggaatgggtcacgcctgcattgcttgaaaaaacggtcaaaagcaccgcgaaaaaggttgatcctgacaagctgaaggaaaaccttgataaagagacatttgcaaaagagctgaaagctgacactgacctgaatgataaattaaacattacggcgacaccgacgatttacgtaaatgacaaagtgattaatgacttctctaaatatgaggagatttcaaaaacgattaagaaagagctgaaaaatgaaaaatagaatcgtatttttatatgcttcttgggtgattgctcttgctgctatgctcggcagcctttatttcagcgagatcagaaaattcataccgtgcgagctgtgctggtatcaaagaattctcatgtacccgcttgtcctgattttaggaatcgccaccttccagggtgacacgcgcgtgaaaaaatacgtgctgccgatggccgtcatcggcgcgtttatatcgatcatgcattaccttgagcagaaggtgcccggtttcagcggcatcaagccgtgtgtctacggcgtgccttgctcatctgaatatattaactggttcggtttcattaccattcctttcctggcattgacggcatttattctcattattatctgcatgtgttttgtcaaaacggaacgcacggcaaaataaagagcctgctccatgggagcggctctttttctattatttgtaccaagctttgtttgtcgcaatctgtctgttatgggagctgtcccaaatatccacggaataggcataatcataattcatgacgcagcggatgccgctgccttgggcgtcatgctgaagtccgaagttatgggaaaactcgtgctgtgccgctttcgccgtgttggccgttccttgatcaaggttcacgctgaaagccgggccgctcggtttgccgttatatacatacgcgataccgccggcgtcaaaacttgattttgcggtaaaaccgacgacaaaatgataattttgatttctgaagctgccttggagattcgataaaatctgagaactgtttgagccggaggaattccaagcctgcacggcctgtacgacgaaatcaatgttgtgatcacggttaaaagcaacatccgcctgctccacgatctggacgattcgcgtttgccagtcgctgtatttggcgcggtattcagcgtccgccaccgccagcactctgaccttctggctgcccgtgctggctttagttgaggctttatcctgactgacattggcattgaatcgtttcgtgccgacctgcttgccgttttcatccagaatttttgtgtcaaccgtctgttcgacttggaccgggcccttcagatctttaaaatgatcggctttcggaagcgggtccgtatacaccgttttcgccggctccgcatgagtgtgcgaatgcgtatggctttcggctgacggcaggccgggaattaatccggcggccaataaaacaggaaaaacaagtgaactgattttcatctcataaccccctttttgttagagaaagtattcaatgaaacttccaataaacctcccaaaatagtataaaataggtaaatgttcttgctcccagccgttgcgagtgaggttgtcccggattaggaatcagaatctttcaaaaataaggttgattttaagagaaagcgattataaaatctaatggtcgtcagaaaatttaacaaataaaaaggagcatatggaatggcctgggagctgcttagtgtaatcggcatcattgcgtttgcggtcagcggagcgattgttgcgatggaagaggagtatgatattttaggcgtgtatatcttggggattgtaacggcgttcggcggaggagcgatccgaaatctgctgattggtgttccggtctccgccttgtgggagcaaggcgcgttttttcaaatcgctctcgcatcagttacgattgtctttttgtttccgaagctgctgttaaggcattggagtaaatggggcaacctatccgatgccatcgggctttcggcgtttgccatccaaggtgctttatatgccgtgaaaatgggccatccgctcagtgcggtgattgcggcagcggtcctcaccggcagcgggggcggcatcatacgggatttgctcgcgggcaggaagccgcttgtgctcaaggcggaaatttacgcggtctgggccgcgctcggagggttaatcgtgggcctcggctgggccggggatgccgccggtttgtatgtgctgtttcttgtgcttgtggcatgccgcatctgcagttatgtgttcaggtggcgcctgccgaatcgttcctatcatatagatcagtaaaaaaccgatttcataaagaaatcggttttttttcataacggcttctgataaaaaaagacgcccgatatgataagaaaaagggtatttgaccataatgctgaataatatgttgcatatatgtttgtaagatgaaagccggatttgtcagcttgatgtcggaggtgccgctgatggcaaaacgtgataaagagtggaaagaagagcaggaaagactcaattttgtcatgaaggaactggaacagaaacaaactcatcttgaagcctcatcgggcggattgaagcaggatattgtcgggctgagaaaaacgttttgggatgatgtcaccgtgaatatggatgatgcccatgaagcggctgagacattttcaagcattaaacagcaggcggaaatgctttcagaacgtgaacggacgcatcggcttcaataccggcagcttcaaaaaatccaaaagctgaaaacctctccttacttcggccgtgtcgattttacggaaaaaggggagtcctcttccgagcggatttatatcgggctgacttctttgatggatgaaaacaacgagcaatttctcatttatgattggcgcgcgcccatctcatctctttactatcaatattccccgggaaaagcccgctatgaagttcccgaagaaacgatagaaggagacatcacactgaagcggcagtttatcattaaaaacgggacgcttaaagcgatgtttaacacggatatgacgattggtgacgaaatgctgcaagaggtgctgagcgggcattccggacagcatatgaaaaacatcgtgtcaaccatccaaaaagaacagaacgaaatcatccgggatgaaaaaagcaaatatctcatcgttcagggagccgccggaagcggaaaaacatccgcggcgcttcagcgggccgcttacttgctgtaccgcggtcgcggggtgcttgatgcccgtcagattgtattgttttccccgaacattttgttcaacagttatgtttccgccgtattgccggaattgggagaagagaatatggagcaggccacctttcaggaatatatcctccgccggctcggacgaaagtttgattgtgaaagcccgtacgagcagcttgaatattgcctgactgaacaaaatcaggacgtacttttcgtaaggctcgcagccattgcttacaaagcgtcaccagctttccaggccctgattgaccgttatgccggatcgctttcggtctccggcctgatgtgtaaacagatcagcttccggggagacatcctgatttcaaaagagcggattgaagcctatttttattcgcttgatcagcagctgccgattccgaacagagcggagctgacggcggaatggcttctcgcggaaatcagcgctctcgaaaaaaaggagcgtaagaaggaatgggtcttgcaggagagcgagctgcttgataaggaagactatgctgaggtttatcaaacactcaagaagcaggcggcagatgatgaacctgcatttgacgaccatcagcgcgaacagcggctgcttggcgccattattgtcggcaaagcctttaaaccgattaagcaggccgtcagacggctcggctttctcgatataaaacggatgtatctccggctgttttcagattggggagctgatgaaaagcccgatcattgggagagcatcggcgctttgaccagaaacgcatttgcagaacggtcacttccgtatgaagatgccgctccgtatctgtatttgcaggatctgttagaaggaaaaagaaaaaacacacaaatgaagcacgtcttcattgatgaagctcaggattattccccgtttcagctcacgtatattcaaagcatcttcccggcggcaaagatgacggtgctcggtgatgtcagccagtcgatttatgcccacaccattacgggcccttcttccctcgccggctgctttcgcaatggtgcagaaaagtatgtcagcctgaagcggacttacagatcgacgcggcagattgttgaatttacgaaagcgctgctggctgacggcgatgacattgagccttttaaccggaacggggaaaaaccgcgtgttttgcggacggatacagaaaatgcgcggcaggaacaattggcggatacaatccgggagctcagacaaaaaggctgggagacggtcgccgtcatctgcaaaacggccgcggaagccaaaaaagtgtttcaggcagtcagcgccgagagcggtgtccgcttgatcaataaagaaaaccagccttttcaaaaaggggtatgcgtcattcccgtttatttggcaaaaggcattgagtttgacgccgtcattgccgctgacgcctctgctgtccagtacaaaagcgaacatgaccgtaagctgttatatacggcctgtacgcgggcgatgcatcatctgaccgttttgtctccgggagaaccctctccttttataaaagaagtgcccgccggcttattcgtgtaagccctttgccaagtgcaaagggctttttatcattaggaatcttaatcattgtcatcatgattatatattttacttacatacaaactttcggtaaagtttcaattagaatattattttgacaattcctatagaaataacgtacgttacgtttaattccttgtgaggtggatatcgttgcaacttcaggtcatgaacagtccgtttaatcaggagcaggcagagctccttaaccgccttctgccgaccttgacagaatcacagaaaatctggctgagcggttatttggctgcggcccggtccgaatccggtgaaacagccgcacccgctgctccggctcctgcagaaagcccggcagtctcgaaagaagtgaccgtattatacggatcgcaaacgggaaatgcggaaggtcttgcgaaacagacggtaaagacgcttgaggaacggggattccaggtcaccgtcgcgtcgatgaacgattttaagctgaataatctgaaaaaagtaaacaatttattgatcgtggtgagcacgcacggagaaggcgatccgccggataacgcgctggcctttcatgaatttcttcacggcagacgcgcaccgaagcttgaagtgctccgttactccgttttggcgctcggggacagctcgtatgaatttttctgccagaccggcaaagagtttgacgagcgtcttcaagagctcggcggcacccagcttgcgccgcgggttgattgcgatcttgattatgatgagccgttttctgaatggcttgacgcggtcatcggcggtttgaacgaaggagcgggaaatcaaacagccgaagcgcctgccgagacgccggctctcggtgaatccgtttattccagaacgaacccgtttcgggcggaggttcttgagaacatcaatctgaacggacgcggttcgaataaagaaacacgccatctcgagctttcgcttgaagggtcgggcctcgcgtatcagcccggagacagcctcggcatctatccggaaaatgatccggcgctcgttgatgagctgatcaatgagctgaaatgggacccaaaacaggaagtggcggtgaataaacaaggagagcgcctcccgctgaaagatgcgcttacttctcattttgaaataaccgtcttaacaaaaccgttcctgcaaaaggccgcacagtttacggctgaccaaaagctgagtgaacttttggccgaaggaaacgaagagcagctgaaagcgtacatcaacggccgtgatctgcttgatctcgtccgggatttcgggccgtgggaagcgacagcggaagactttctttccatcctgcgtaaaatgccggcccggctctattcgatcgcaagcagtttagaagcgaatccggaagaggtgcatctgacaatcggagcggtcagatatgacgcgcacggcagagaacgaaaaggcgtctgcagcattctgtgtgcggaaagactccagccgggagatacgcttccgatttacattcagcacaaccaaaacttcaagctgccggacaatccggatacaccggtcattatggtcgggccggggacaggcatcgcgccgttccgttcctttatgcaggagcgtgaagaaaccggagctgaagggaaaacatggctgtttttcggggatcagcactttgtcactgattttctgtaccagacggaatggcaaaaatggctgcaaaacggtgttctcacaaaaatggacgtcgctttttcccgggattcggaggaaaaagtatatgtgcagcaccgcatgaaagaacaaagcaaagagctttatgaatggctgcagcagggagccgccgtatacatctgcggtgatgaacagcatatggcgcatgacgtgcaccaggcgcttctcgatatcattcaggaagaaggcggcatgagccgtgaaaaagcggaaagcttcctggcagacatgcagcagaaaaaacgctatcagcgtgacgtatattgattttggtttgaaaggagcttattcagcatggtgaacaacattttaaaagcgccggaaggccctccaagtgatgttgaggaaattaaagaaaaaagtgattatttgcgcggcacattgaaagaagtcatgctcgaccggatttcagccggcatcccggacgatgacaaccggctgatgaagcatcacggaagctacttgcaggatgaccgcgatctccgtaatgaacgtcaaaaacaaaagcttgaaccggcttatcagttcatgctgcgcgtccggatgccaggcggcgtgtcaactccggaacaatggcttgtcatggatgaactggcgcaaaaatacggaaacaatacattgaagctgacaacgcgtgaaacgttccaaatgcacggaattttaaaatggaacatgaaaaaaacgattcagaaaatcaatgcggcgctgcttgataccattgcggcctgcggagatgtcaaccgaaacgtcatgtgcgcttcaaattcgcaccagtctgaaattcatgcggaagtatacgaatggtcgaagaaattgagcgatgaccttcttccgcgcacgagagcctatcatgaaatctggcttgatgaggaacgtgtggcgggcactcctgacacggaaacggaaccgatgtacgggccgctgtacctgccgcggaaattcaaaatcggaatcgccgtgcctccgtccaatgatatcgatgtcttttctcaagatctcggcttcattgccatcgtggaggaaggccgtcttatcggattcaacgttgcaatcggcggcggtatgggaatgacgcacggcgatacggccacttatccgcagctttcaaaagtcatcggcttctgcaaaccggagcagctgtatgatgtagcggaaaaaaccattacgattcagcgcgattacggaaaccgttccgtcagaaagaatgccagattcaagtacaccgttgaccgtctcgggctggaaaacgtaaaagccgagctggaaaaccgcctcggctggcagctggatgaagcgaaaccttatcattttgaccataacggcgaccgttacggatgggtgaagggtgtaaaaggtaaatggcactttacgatgtttatcgaaggcggccgcgtcacggactatgagaattataagctgatgacgggattacgtgaaatcgccaaagtccatacgggagatttccgtctcacctctaatcaaaacctgattatcggcaatgtctcgagccagaaaaagaaacaaatcagcgcattaatcgaacaatacggtctgacagacggccggcagcattccgccctccgccgcagttcaatggcttgcgtcgcgcttccgacatgcgggctcgccatggccgaagccgagcgctatctgccgaaattgattgataagattgaagacattgttgacgaaaacgggctgcgggatgaagaaatcaccatccgtatgaccgggtgcccgaatggctgcgcccgccatgcgctcggcgaaatcggatttatcggaaaggcgcccggaaaatataatatgtatttaggagcggcgtttgacggcagccgtttgagcaaaatgtaccgggaaaatatcggtgaagaggaaattctgaatgagcttcgcaccattctcccgcgctacgcgaaagagcgtgaggaaggcgaacacttcggcgatttcgtcatccgcgccggcatcattaaagcgacgacagacggcacgaattttcacgaataagatgagcacttaaaaccaaggatagagacacactgacggtgcgttctctatcctttactaagcagcataaacgctgcaccgcgtcatgaaacagatgacgcagcttgcgaaaaagcctgttttcagagaaaacaggctttttctttttctagaaaaaatgtagctgaaggcaaaaaaagttcgccgtgagcacgttatgagaaattttaaataaaaacgggtaaaataaaagaagaatggttgcgtgcggaaaatatattgaatctgcccgatcatcggctccggcctttggcaaaggcagagaacaggcaataatgatatgatgcagcagatgaaggaggtcatgctttggacatatttttagtcgtactcgtacttttaaccatcatcgcgatctcaaatatcgtaaatcggtttgtcccctttatcccggtgcctttgattcaggtggcgctcggtatcattgcggcgtcatttccgcagggacttcattttgaactgaataccgaattgttttttgttttgtttatcgctccgctgctttttaacgatggaaaacggacgccgcgtgcggaactttggaatttaagagcgccgattctgctgcttgcgctcgggctcgtgtttgccacggtgattgtcggcggttacacgattcattggatgattccgagcattccgctggctgccgcgttcgggctggcggcgattctgtcaccgactgacgttgtcgcggtcagcgcgctgtcagggcgagtgaagatgccaaaaggcattctgcgtctccttgaaggagaaggactgatgaatgacgcatccggcctggtcgcttttaaatttgcgattgcggctgccgtgacgggcgcattttcgctggcgcaggccgccttcagtttcgttctgatttcagccggcggtttactcagcggtgtcgtcatttcttttttgattatccgtttccggctgtttttgcgccgcctcggcatgcaggatgtcacgatgcatatgctgattcaaattctgacgccgttcgtcatctatctcgcggctgaagaaatcggcgtttccggcattttagctgttgtggccggcggcatcacgcatgcggtggagcaggaccgtcttgaatcaacgatggtcaaattgcaaatcgtctcttcaagtacgtggaatattattttgttcattctgaacggtcttgttttcgttattttaggtgcgcaaataccggatgtggtttctgtcatctttaatgataccgcgtttaacaatatgatggtcatcgggtacattatcgtcattacgctgacgttaatgattctcaggtttttgtgggtgctgtttttttggaacggcaagtggttttttaacaaggatcagagcatttataaacccggcctgcgctcgaccctgctgatttcggtttcaggcgtcaggggagcggtcacgcttgcgggttccttttccattccttacgtgctctctgacggctcaccgtttcctgaacggaatttgattctctttttagccgcgggtgttattatgtgcacattggtgctggcgacaatcgtactgccgattttgacagataagccggaagacaatgtgaaagagaagaaagtcaaattgctgacagcgagacggaagctgataaaagctgccttaaccgccattaaagaaaatatgaatgagacaaacaaaacggcttcttttgcggtcattgccgaatacaatgagaaaatgaaaaatctcagatttcagcagttcaccgtcaaaaaccgcacgaaaaaagatgagcggaaagtccgcgcccaagggatacaggctgaacaggaagaattgctgcggctgattgagcggggcgacataccggaagaaacggctgacagccttcaggaacggtttgatgaactggaagtgctgtatacgaatccgtttaaagtcggcttatctaagaaaaagctgaaacgcctgatgtactggatctttttcggtgaacataaaaagccggaaatgacgattttaaatgaagaaggcctcatccgcgccacaagggttaaaacggcaaaagcggccattgaaagcctgaaaaaacacatgaccgaagaaaataaagatgtgacgcttgccgtcatttccttttacaatcacctgattttcaggctggggcactcgtatcacgaacagaatccgagccgccgttttgaaaatcaaaaactcgaaatcaaactgcgggccgtgcaggccatccgcaatgaaatccaaacattattcgaagagcgggaaatttcccgggacatgtcacatgagcttcgccagtacattaatgatgtggaagcggcaatgcttgacggaggagaataaaaaaagtccggcgcacaaggcgccggctttttttgcatattacggccgatggaattcaactgaattgccgtcgcggtcaaaccagcctctgaaggcccagttgatccagccgccatcacctttattggtgaagcttccgtcttcaaacacccaaatgccgtacgtgatgccgtcataaacggcggaaccgtaaaactgaacgccgttaaaatgatcttcatattcctggcttaaattaaacaccatgacgttatatttttgtccggaagcgtagaatgaagattccattaagtttttgacgaagccgtcacggttttgcgccgacttaatcgcgtcagcaatcgaattgccgatgccgagcaggtcaacgtcaatgtttaatccgacatcttttgctgagacatctgatgattgctgtgccatgttttgagggaccggggtttcttttgcggatacaaaggacagaggagtcagagacaaagcggcgccaagggcaacggacatcgggatacgcatacgtttcatatgatttcctccttcaattgtgtggtggctacagtagcgatttacccggacagttacccggctaaccggaatttttgaaaaataggaaaataataacggaagtggtgcttgggcactaaagatggtttttgtgacgacgatgagcgtataattggtttcttacggcggaaatgtgagataataataaccgtttacataatgactagaaaggatggttcaacgtggcaaaaagcttaaaagatactgtaaagcttcataatggcgttgaaatgccgtggttcggccttggcgtcttcaaggtggaaaacggaagcgtagcggcggactccgtcgaagcggcaatcagaaacggctaccgcagcattgatacggcggctatttacaaaaatgaagagggtgtcggcgaaggcatcagagctgcgggcgttgcaagagaagaactgttcatcacgtcaaaagtgtggaatgaagatcaaggatacgaaacgacacttgacgcgtttgagaaaagccttgagcgcctcggcctcgattacctcgatctgtacctgattcactggccgggcaaggataaatataaagacacatggcgcgctcttgaaaagctgtacaaagacggcaaaatccgcgccatcggcgtcagcaacttccaagtgcatcatttagaagagctgctgaaagatgctgaaatcaagccgatggtcaaccagattgaattccacccgcgcctgactcaaaaagaagtaagagatttctgcaaagcgcagggcattcaagtggaagcttggtctccattgatgcagggacagctcctcgataacgaagtgctgtcacaaattgcggaaaaacataacaaatcggttgctcaagtgattttgcgctgggatcttcaaaacgaagtcgttaccattccgaaatcgattaaagagcaccgcatcatagaaaatgccgatatttttgatttcgaactgtcacaggaagaaatggaaaagatcagcgcattgaacaaagacgagcgtgtcggcccgaatccggacgagcttctgttctaagaaaaaacagccctttacggggctgtttttctttacataaatgtctgtgtctgacgttttacgctgaacctgtatgcggctattaataacagggcggcggcgaaggctcccaaaatgatgatgttcagcatcaggctttggaacgtgcggccttgctgcaattgatccaccgtatcgagcacccagcgctgaggcagaaattcggcgattgtctgcaccgttttcggcataatattgcccggaaagaagcagccggccagcaagcatgtcggcacgacgatcaaattcaaaagcgccgatgccgaagcgctgctattggaaaaaccgacggcaataaaggcgaccccgatcgcgcttaatgcaaacagcatcatcaggacgaacagctgccacagcgggaatgacggatgaatatgaaaagcggcgcccataaagagaacggcgaatagaatttggacggccatgataatgatattcaccgccgcgttcgccaatacatactgctttgatgtgatcggcgttgacagaagcctgtagtatgtcctgttttctctctctttaatcattagttccgtcaggttgcctgcggaatagagcataatgataatgagatacccgatgactgagtaagtcatttctttatggttcgatgtatcttgtaaaacagcggactccgtttgaatgggagaatgcttgaaatcggcgtacatctcctgaaaggcctttgcgtctccgccggaggatttgccgattgaggcgacgctgttcatataattgtacaaataagagctgacatatccggtgacctgggcgcctttcagcgaggtcatgccgatgtgagacggtttcccgtcttttacgctttgggagaagcctttttcaaacgtaatgagcgcctccatttttcctgaagcgatctttgatgaggcggacgcagccgtttcctccgaaatcttcacatgatccagtccttttaaaaacgtgaccgtatcctgtgccacttctccgccgtcttgattgagaatgccgatattgagcgtttcggccccgccgttggcattggtcatgaaggagaggaagacgccgatcagcggagccccgatataaagaatgagctgttttttgctttttgtaatccctttgagagtgtgcgcaaacagccaccagaagtttttcatattacagtccctcccgtctttgaaacgtaaatgcggcgatcagcaaaaagagtgccgctaatgctgtatttaaaccgagtgcaggccatgccgctgatacatcatttgcgtaaatgatgttgttaatcgccttattgatccaggataagggcgacagggcggaaattcctccgccttcatatttgtaataggcgccgccgataatggacatcacctgaacgatgatgacggtgattaatctggcgctttcgggttttctggtcaaatagctcaggctgagcccgaagctgacggccaaaagaatttcagaaacgagaatcaaaagcacaagtcccatgtggctgccccaattcgctttcaagataaatttgctgaaggcgacaacggcaagaatcgtcagaacattcacagccaaaatgccgagcatctttccgagaaagatatcgcttttccggagcggggcggcgatcaggcgatctgcggtgtgccgtattctttccccgcggaataaggtgcttgcaaaaatcgaggcgtacagcccgatcatcgtcgtcatggatatcgcgtaaaaatctttcgctttcggttctttcgctttgtgtaaagacgtctgcttcatataatcgcttttgatttgtccggcggaaggcgccttatgcgccttgtaagcggcggcgcctgctttgtattgattggtaaaagcggtcagcatgccttggacaatcgtgccgtttatgccgctccggtcatttgtatagacttgaaaaccggtgttttttacagtgacgaaagcatccgcctgattttctcgaacctcgtttttgccttttgcctccgtgtccgctttttgaaaatagacatgctctttttttgcggctttcataaactcagtaaaatcatgagaaagagggccgtttgactggtccgtatatacgaccttgatatttccgaccgtcacctctgaatcaaaggcgtttgataatgccgcagtaaaaatcagcatgaagacgatcggaaaagcaagcatgaaaataaaagtccgtctgtcgcgaaaactgattttgatttctttcacggcgatgtgcagaatattcatttgcaatcctcctttcagtgaggtcagtcgcgcaggcttctgcctgtcagcgtgagaaataccgtttctaagtcaggggcctgttcctgtaaggagcggatttcaattcctttgtccatgaagtaccggatcaggcggtttaaattgttgacccctgtgtcagagctgattttcacgctgttttcttccagtgtggcggctctgacgccgggcagctcctgaatatcgccgaggctgatgccgtttccggatgacagctcaatcacgacgtccttcgtgtcggtaatgatggaggtcagctgttcttttgtgccttctgcgatgacttttccgtggtcgatgatggcgatgcgcgtgcatatttcttccacttcctccatgtagtggctcgtgtagatgatcgtgcagcccatttcattcagctttttcactgattgcagaatataatttcttgattgcgggtcaataccgactgtcggttcatccatgatgatcagtttcggccggtgggcaagggcgcaggcgatattgagcctgcgcttcattccgccggaaaaatgcttcggcaaatatttgtgtttatcgctcaagccgacgaatgtcagggcctcctcaacccgttctttcagagccgcccctctcaggccgtacagcccggcgaagaacttcacattttcataggcgtttaattcttcgtaaatcgcgaggtcctgagggacgatgccgatattcattttcgttgctttgctatatttgaaaatatcttttccgagaaacagaatgtctccgcctgaaggttttaaaaggcctgagatcatattgatcgtcgtgctttttccggctccgtttgcgccgagaaacccgaaaatctcaccttcttttacggcaagcgacatctggtcaacggcggcataatcaccgaatttcttactcagctgtttgagctccaaaatgttcatgtttccacctctatgtcttatgatgctcttattataaaaaaaagaatgaacggccgttagtgcagctgttcattcctttgacatgagaatcttcatatttttcacatgaaaacattcacttattcaaccggaagcaatgtcgtgacggaaaaaccggccgtgccgtcaaaaataacggttccgtgcaaaacggccgcccgttcttccataccgagcatgccgagtccttttttaaagcggacggcgccgtttccgttatctttcacttccgctttcacggctttgttcagcacatggatatcaatgaagatctgtgtggcatcggcgtatttcattgcattggtcaaggcttcggttacgttttcctgaatgactctccaatgcatttgcgtcagtctgtccaaatcgccttgatgcgtaaacggaaccggcatcccgtttttggccgaaaattcatcaataaacgttcttaatctgtgaatgcccatttgttcagcgggcggtttcatatttttaagcgtaatgcggatatcctctatgccttctttggaaatggtaatggcgttttggagcagttcagccgctttgtccggatgggagccgagcatccgcttcgccgcttccatctgaatgagcgcgcctgtcatggaatggccgattttgtcatggatggcttgggacaacctgtttctttcttcgagtttgccggtatactccgattgtttgatatattctgtgctgctgtgcagctgtttcgtcagtttttcaatgcttgagcgcatattgtctgactgctcttcatattttttcagccggtcgctggaccgggcggccaaaacgaatatcgccaagcagaacaaggtcatgacgatataagtcggaaggtcgccgtacgggataaataaaaacggcaaaaacacgagcaggcagaacacatagcggtgaaccggatattcggcaagaacggcaaaaatggcgggcggcaaaagaaatagaaacgccggatggcctaaggcggaaagccaggcagtcaatgcaagcgaaagcagggtgatcccgcgcctccaagcgggcggcctgatcatgcagaccgcaatgcccaaagacagataagcgagcagaaacaagacggcgtacggcgtgtaagggcggtctgccgatacgaacaaaaaagccgtataaaaaatggcgatcagtctgctcatcagcatccaaaaatccataccgttcaacgcccgttatccaccttcccggtgatataataaatcgcgatctgcgttctgtgctcaagccccgttttccctaaaatagatgaaatataattggccgtcgtcccttcagaaatgaaaagctgttttgaaatttccctgttcgacagtcctttcgcaataagcgacatgatgctgagctctctttcagtaaactggctttcatcaatctgatgcgcggcttccgccggccggaaaaggctgtcttttattttatccagcacggtgtcctgaagaatgctgtgcccgttgaaaacgcttttgatcgcatcgcgtatccgttccggttcggtattttttaataaatatcctttcgcgccgtttttaatcgcttctaaaatatactcatcgtcgtcaaatgtcgtcaggatcatcggcttcgtatccgtttcctccgcgatccgttttgcggcttcgacaccgttcatcaccggcatgcggacgtccagcaaggcgatatcgacgggattgtgtttacaatactctgccgcctcgagtccgttttccaacgttgccgatacagtaaattcctcatatgtatgcaaaatgattttcattccttctctgatgaaagaattatcatccgcgataatgacattaatcttcatggccgcaccctttgtgtgttttttgtttcattatataccatccgattttaaatcaaaaagccttccggcgaaaggtgcgcggaaggcggatcggtcaagcgggttttttcaattgaatgaaaaacagcatcaggaaagaaatgatcacaatacagatcacccacacccaggcgagtgtttcattgccggagtccatcgcgacgtaaatcgctgtcggcagcgtttgggtgacgccgggaatatttcccgcaaacattaaagtcgccccgaattcacctagcgcccttgcaatactgagaatgcttccggtcaagagggagggaaaggcaagcgggacggaaatacgggtgaacacctgccatctgccggctccgtctactttcgccgctccctcggtgtcagcatcaaccgcggcgaagcccgttttagcggactgatacataagcgggaaggcgacaatggccgaagcgatcaccgcggccgaccacgtgaaaatgacgggctggtgaaaaatccgctcaatcgcccggccgataaagctgtgtttcccgaaaataataatgagaatgaagccgacaacggtaggcggaagaacgagcgggagcataaacagggtctccacagccgtttttccgggaaatcgcgctttcgccatccaggcgccggcaagcgtcccgagaatgatgacggcgatgcctgatgccaaagccacctgaaacgacagtacgacgggagtgaaaaactccgaagccgtaatgttacttggcagtaaatccatatttcttaaacactttcatcgctttatctgactgcagatactgataaaacgcttctgcttctttacggtgctttgtatccttgacgatgccgagcggataaacgatctgatcgtgcgttttcgccggcgcttcatcggtgattttcacctttttcgaaatcagcgcgtctgttttatagacaagcccggcatcgacatttccggtttcaacataagaaagcacctggcgaacgtcttttgcatagacgactttatcttttaccttgtcccacagggataatgccgtcaatgactgtttggcgtattgtccggccggaacggattcaggcgtgccgagcgcgattttttccgcgctgtcttttttcaggtcattcagatgtgtcaggtgtgcgctgtttttctcaggtacgatcatgacgagatcatttttcaaaagatccgtgctgtcctttttgtcgatatctccgtcatgaacgagcttttcgaatttatcttcggctgccgagaagaataaatcagctcccgcgccttgtgaaatttgtttttgcaatgtgcctgatgatccgaagttgtcttgaatggttacgtttgaatgtgatttttcgtagttggtctggatttcttcaagtgcatcctgagcgctggctgccgcagaaacggtcagcgtgactttttcgttttgtccgcccttggacgattgtccggatgagcagcccgcagttgccaggaaaacggccatagccgcagttgtgagtagtgtcgctttctttttcaacattgtgcaccccttatagctaaatatcattagatcaaactaattataacgcaattgtacgtgatggtgcggttttttttcaatatctgaacagttataataaaaacggagcgtgataatatgacagaagccacttcctatacaatagaagaagttgcgggccttttgaaggtctccaaactgacagtatatgatttgataaaaaaaggactcattccggcgtacagggtcggaagacagatgagggtcgatgaagaggacttaaaacaatataaagcaaacatgagaatgtcaaaaaagccatccgtatcagaagctgctgacccgtcccgcgggcgggagccggaaaaaaggcagtccgttatcatcagcgggcaggatgtgtcgatggacctcctcagcaaacagctggaacaaactatacaggcggctccgctccgcaagtacagcggcagtttgaacagcctgatcgagatgtaccgcggagcttgtgacatcgtcagtctgcatttgtacgatggggagacggggcagtataacatcccgtatgtgaagcgcattctttcaggggagccgtttgcgctttttcatgtcgtgctgcggcaagccggattatatgtgaaaaagggcaatccgctgaacattcagggttttcaggacatgagccgaaaagatgtccgcatcgtcaatcgcgaaaaaggatcaggcgcgagggtgctgctggatgaacagctcagatcttccggcattacgccgtctgatgtcgccggctatcatgacattgtcacggatcatctgtcagcggcttcacaagtatcaagcggaaaggcggatatcggagtcgggtcgcagcatgcggcgcatatggcgggcacggactttatcccggtgatcagtgagcagtacgatgtggtcgtcttaaaacaaaaccgggagcttgttcaaagcgtgcaggacattcttaattctgaggaattcaagtctcagctttctcaattatccggatatgatacgaaaatgaccggacggcttatatatgaaacatgaaaaatccctccatataacggagggatttttttattgcttataaaaccgcagcaggtcgccgtttaatattttatcggaaagcatcagctcttgttccgctttttctttctcatcgctgcacgcgctcatgtcagaaagcggttcacccgttttacggctgtaacacgtatttttcgtataaatatgatcatccgtgataaagctgccgtttctcagcaccgcaaacggggtccgctctctggaaaacagatcattgccgaactgaatgctgcctttcgtttcaatgccgagcaggtgaagcagcgtcggtcttacatcaacctgtcccgcggccgaagcaatcgtttccggcgcacggtcggtcaccccgggaatatgaatgataaacggcacgcgctgaagctgaaccgtatcaaacggagtgatttcctctttccctaagaattcggcaagtccttgattatgggcttcggatataccgtaatgatctcccatcaggacgatcatcgcgttgtcatacagtccttcttttttcagcttcttgaaaaagtgtttcagggcctcatcttcatagcggaccgtcgtcacatagcggtttaataactcgctgcttgtgtccggttcttcaatgagctgatcctgtttatcaatttcaaaaggaaaatggttggtcaaagtcagcaggctcgcgtaaaacggctgcggaagcttctttaatttttccgctgactgttcgagaaattccttatccttcaggccccagcctgttgaattttcctgtgtcaccttaaattcatccgcgtcgaaaaaacggtcgattccgaatgccccgtacatctcatcccggttccaaaaggccttatgattggcatgcagaacggctgaatagtattgacggtcttttaacatatggtacatcgtattgaaccggtggccgctttttgtgaaaaaaacggcgccgcttgaagacggatacagcgaattcgcagtaatgaattctgaatctgaggtttttccctgttcagtctgctgataaaaatgagtgaagtcataactttttttccgcagtttatttaaaaacggggtaatctcccgcccgttgacccgctcatccattacaaaacgctgtgttgattcgagcgtaacaaaaatcacattgcgcccctttgcgagcccgaactttgattcggacggcctgctgtagtcggcttgagtgtaattcgcgaccgccgcaaggctgtcttcgtcggcaaacgctttagcccctgcattcagcgtctgcgaaatggtgtcatacaaatgaaagtggaacaggccgattccttttacgagcgcttcacgatcaaaagggtgcttgaacagcttcggctgctcagcctcagacagcgcaaggttgcacagcatgaggccggctgatgcccacgcatacgctttaacggtacgggtgctggctttacctttatcggctttatgccttttaccaagataaaacaaaaccgcaatatccaaaaataaagcgatataaagcgggtgaaacagctcttggacgctgcttcccatatcacccatattgctcgcctgaaacaaaaccggtatggtgataaaatcaatataaaacccgtaaaacaccgtattcgcgattaaaattcccgtcagcatcacatttgccgaaagcagaaagatccgctgttttttttctgtcagcagcagggcgatgccgaacagcggcacaatgaagctcagcggattaatgagaagcagacattcctcaagaaccgaattgttctgcagatcaaaaccgagcttataaacggcataggttttcatccacatgaacaggatggacaggcataaaaaccgatgattgctgaaaaaggttttcttcatatgtatgactcctcaccctaaaagcgaaagatgctttttgtttaagagatgcggccgtgaaccagttcgtataaataatagcaggatacaatcgttaagccggccagcacaagctgctccgaaaagctccccgttctcatataaaggggaagacggaagcggatggcggacggaaacagcagtttaatgccgttgacggtccatgcgtcaagcacaagatgactcgccattccgatcatcagtccggcggaaatgctcggattcggaatataggttgccgtaatgaaaaacataataagcataaacagcaggctgtgtgtaaacgttctgtggccgaacaccgtgcttacgattttggacagaacgggcagcgtcctgccgattttgcttttcgtatggcatatgtcgggaatcagcgccccgagggcacccgctgaggtcataaggaccggatcatacccgtaataatacgcaattgcggaacaagaagcgatgcctcccatgatgtgtgtttttcctgtcatttttcgcttctcctttttatttttgccaaaatcccctgaattacaaatatatcaagagaatgcatgtttgatcaacaaactttacctgttccgccaaaaggaaggagacgcggattccgcatattctgccgcggaaaaagacacattataggtgtaccatatttgataaagaggtgatacagatggctttctttaacaaagaaaaaggaaaaaacagcgataaaaacaaaaatgtcattcaaggcgcgcttgaagacgccggtgcagctctgaaagacgatccgcttcaagaagctgttcaaaagaaaaaaaacaaccgctgaccatataagacgggtagggcgaacgctctatccgttttccatctaatttttccctttgacagatctttttatctctgataacctctgagtagaattgaatgataaaaatcctcactctttctcggtgaggtagaggttgcgcttgatgatgagtcgcacatgccaggctgataggggccgcaaaacatgtgttaaaggcatcagcgccgaagtgtaaagaaagccgatccttctttatgctgggactgtatctgaataagtgcaggactgccgcgtgctttttcgcggagggctatccggagatcaagggtgtgtgtgtttctttaagcatggacttttgttcaggctttttttgcgtgtaaatatgatctcggggtctggtccgtacgaatgaacaaccaggaggtacaggaatggaacagacgaaaaaatggggtttttggttattaacggcgtttgtcgtaggaaatatggtaggctcgggcatcttttcgcttccgagtacgctcgcaaaaatcgcgagcccgttcggcgccacatcggcatggcttttaacgggagccggtgtgttaatgatcgcgctggtcttcggccacttatccatccgcaagcctgagctgacggcggggccgcaaagctatgcgcgtgcgctgttcagcgatcggaaaaaagggaatgcagcgggcttcacgatggtctggggctactgggtggcgagctggatcagcaacgtggcgatcatcacgagccttgccggatatttaacatcatttttcccgattttaacggataagcgtgaaatgttttcgatcggcggtcaggctgttacgctcggccagctgctgacgtttgccgtatgtacggttttattatggggcactcacacgattctcgtcaccagcattaacggtgcgagtaaattaaattttgtcacgacgttttcaaaagtattaggatttattttctttatcattgcaggtttatttgtgtttcaaacgtcgtttttcgatcatttttattttccggttcaaacaggtcctcacacagttgagggaatcggcggacagatccacaatgcggcgatttcaacattatgggcgttcgtcggaattgaatcggcagtcattttatccgggcgcgcccgttcgcagcgcgatgtgaaacgcgccaccattaccggattattgatcgcgctcagcatctatatcatcgtgacattgattacgatgggcgtgcttccgcatggtaagcttgtcggctcggaaaaaccgtttgttgacgtattgtacgcgatcgtcggcaatgcgggaagcgtcatcatggcgattctggcgattttgtgtctgttcggaacgatgctcggctggattcttctcggctctgaagttccgtatcaagcggcgaaatcaggagactttccggctgcttttgcaaaaacgaataaacagggaagcccggttgtgtcgttaatcgtaacgaacgtgatgtcacagatctttatcttttcagttatttcccggacgatcagtgacgcgtttacgtttttaacgacggcggcgacgctcgcttatctgattccgtatctcgtgtcagcgttttacagcctgaagctcatttttacgggtgaaacgtatgacgagataaagggttcaagagtaagagacggtatcatcgccatccttgcctgcatttattctttttatgtcattattaccggaacggccgatttaacgacctttattctcggtatcgggctgttcttcgtcggtttgctgttatatcctttcgtctcaaagaaatttgcaaacaacagacaatcggtatgacaaaaagacatctcacgtctgtgagatgtcttttttatttgcggcggcgggttacgttttgacggcgtgtatataatgaatggtctcgaatgcggttaaatggtcagtgcgtccgctgaaaaaacggtcaagtgtaaagcgtaataaaaagccgctgtgacagcggcttcggggttacttcgttaagctttttgtgatgtagtcgagctggccttcaagtgagatcgggtctgagaaatagaagccgatcggatcaatgcggtagacatggttttgtttgacggcatcgaggttcttccagattgagctgtcaagcacgcctttgtcgtcaccgccggcctgccatggccccataaagatgtagtctcccgcgaagtcaggcagtttctcgagtgaaatgctggcgtagcccggtccttgattaatggctttttcctgcgtcagttttgtggccttcagcccgagtttgtcataaatgatgcttccgccgcggccgaagtctttaccgaatacatagatgtcttttccgtttgtctgcatgatggagatggtttttgacccgaccgctttttgaacctttgttttagcggcagcggttttcttgtcccattcagccagccatttgtctgctttatcttcagtgcctgtcattttcgcaaactctttgaattgatcaatgttgctgagcttgtcatatttaatggcgatggtcggcgcgattttttccagtttttcaatatcggcgccttgtgtcgtccagacaacgattaaatccggctttaagtcaatgattttttcaacggacgtgccgtcgccgatgtttgtcacaccttttgttttccctttgtaataagggtttttaaatacgttttgcggcgcgccgacaacattgatgccgagctgtttaaagtcgccgtagtagccgtcagccatgacgacgacccgtttcgggtgcttcggaattttaatattgccgttttcggctttatacgtgatggtttcttctttttcagaagaacctttcgagtctgaagaattgccgcatgcggccaaagcggcgatgagcagcatggcaatcagcgctgcgccgattttcttgtatgtatggaacatctgacattccttctttcatgagtattagtgataaagagaatcattatcagtgtgattatatcactgctttcatagagaagcacgctcttttttaagaaaaactttctttttttatatgaaattaggtctattaaaagagaagataaaagtgctatactgaaacaagtcattgataatcattatcattaccattcttgttttgagaaaggaagaacgagtgttgggtctattgaaaaagaaacagacaatgacggctctaggggcatcagggagtgaaatccagtggacggcgcgttcattcagagcggctgtgctgctgtgtgccgggattgcggttttattgatcggcgcggccctgtctgtttccatcggagctgccgatattcatctgcggacggtgtgggatgctctctttcactttcagccgcaaaatacatctcatcaaatcatacgcgatctgaggctgccgagaaccgccgccgccgcgctcgtcggggcttttttagctgtgtccggggcgattatgcaggggctgacgcggaacccgcttgctgagccttccattatgggcgtgacgtcggggtcaggatttgcgatcgcattggcgtttgctttttttccgggcctgtctgcggcgggacttgttttgtggtccttcgcgggagcgggaatcggagcgcttattgtgtttggcatcggcctgttttcaaaaggcggtctgacaccggtgaagctcgcgctggccggtacggcagtcggctatttcttaacggggctttcaagcgcgattgcgatccgttttgatgtcgcccaggatgtgaagttctggtatgccggaggagttgcttccgtgaaatgggaaggcgtgcagctgctgttggcggtcggggttatcggacttttgctggcatttctgattgcgcgctcagtgacggtgctgagcttgggtgaggagctggccaaagggctcgggcagtacacatcgcttgtgaaagtaatcggaatgtttgtcgttgtcctcttgacgggggcttcagtctcagtcgccggagccatttcttttatcggcttggtgattccgcatatcacccgatttttagtcggggtagattacaggtggatcattccctgttcggcggtattcggcgccgttctgttagtcttcagtgatattgccgcaagacttgtcaatgcgccgtttgaaacaccggtcggcgctttaaccgcccttatcggcgttccctttttcttttatttggcgcgcagggaaaggagagggctgtaatgaatgtaaaatcgaaaaaaccgctggcggtcatggccgttacgtttttgctcatatgcatcgtcttttttatcagcttaaacatgggcgtgatccggattgcgcctcttgatacgctacgtgtctttttcggacaaggggatgcccgggatcagctcgttttatttgaattcagactgccgcgcatggtgctgtcattgctggtcggcgccggaatcgcggtttcaggcgcgatttttcaaagcgtgtctcaaaatgacttggcggagccgggcattctcgggattaacgccggggcgtctttggcggtcgttttgtttatcttctttttccaaggatcagctgctgatttaagcatggccggtacatggctgcttccggtgagcgctttggcgggggcttttctggctgcgctgctcatctatgtgctggcttggaaaaaaggcgtttcacctgtccggctcgttttggtcgggatcggcgtcaatgcggggtttaatgcgcttctcttgatttttcagctgaaaatggacccgcgggatttcatgcaggcgcttgtatggatttccggttcgatttggaacgccaattggaaaatggtgctgtccattttgccgtggctgctggttcttttaccgttcagcctctataaagccaggtatttaaatgtgctccagctcggtgatcagctggcggcggggcttggcacccgggttgaaaaggagcggcgcgttctgctgatgtgcgccgttgccctgaccgcgtcatgtgttgcggcagccggcggaatcgcttttctcggactcattgcgccgcatttggccagaaggcttaccggaccgcgccaccagacgcttatcccggtttcggctttaatcggagcatttttatttctgcttgccgatacgctggcgagaaatgtgcttgcaccgtccgaagttcccgtcggcctggtgatttccgtgctcggagcgccgtattttgtatatttgctgatgaaaacgaaatagaggaaggagactgccgcgatgaactcattatcggcggaacagcttactgtcggttatggcgaccgtttgatagcgaaagaattggatatcgccatcccgaaaggaaaaattacaacgctgatcggtccgaacggctgcggaaaatcgacggttctcaaaacgatgtcaagaatcatgaaaccgaaatccggcgccgtctatttaaacggacaggcgatcatgcaaaaatccacgaaagacatcgccaaggaaatggcaattcttccgcagacgcctgaagcgccgagcgggctgacggtgtacgaacttgtttcttacggcaggtttccgcatcagtccggaatgggccgtttgagtgataaagaccgtgacatgatcaaatgggcgcttgaagagacggggatggccgaattttacgaccggccgatcgaagcgctttccggggggcagcggcagcgtgtgtggatcgccatggcgctcgctcaagaaacggagctgctgcttcttgatgaaccgaccacttatttagatctcgcccatcagcttgaaattttgcagctgctggacaaattaaacaaggagcagggccgcaccattttaatggtcattcatgatctgaaccatgccgcccgtttttcccattacatgatcgccctgaaaaaagggcgcgtcatcaaggaaggaacggcggaggaagtcatgactcccggcatattggaagacgttttccaaattgacgcacagattgtaaaagatccgcgcacgaacaaaccggtctgcttaacctacgatttaatccggcatgaaaacgcaacggtatgatgaaaaaaaacgcagagccattccggcctgcgtttttttattgcgcccggggctgcttttgtccggagacgcatttatccaaaacgaaaaaaacccccgccacaatcagctcctccgtcgttgacagccaaatcttttcaatcagtttatccgtcgtatacgcggtcatccagaggaacagcagctgaacggtgctggctaaaaggagaaaaggcagcctgcccgtcccaaaaaaggtaaagctatgtatcatcagccgctcaagcggttcaaaacataaaccgagaaaaataaaaagcacggaaaaaagcaggacgtacgccatcgatccgtagctcgtcccggctaatgaaaatacggccatcatcacgataaaatacccgaataatacggcagcggctgccagggcataccggagcacctgaagaaaaaacattttcgtcccgttttgattgatcatctgttcagctccttttcacacagaggagacttgcagagacggaactctgcaagtcgatgtatcttcagcatttctttttgacgacagggtgtttctctttcgaaagaatatccgtaaagtctttgcccagatccagatgctgctggacgaatttctcaggaagcatggcaagccattggttcagggacacatcggcatagtggtcatccttgaagatttccaggaagacgagcggctcatctcccaaattctccacatagtggcccattgcgaacgggacgtaaccgacatccccggcctgatagttaaatgttctcgcatggccgtccgatgcaaaaaccgtcatccgtcctttaccggaaatataatactgccattcatgcgtgttcggatgccagtgcagctctctcattgcgcccggttcgaccacgacaagcgctgaagcgatcgttttggacactttgaagtttgtggaatccgcgatatatactttgccgccatctgtctcagcagtcgggccttcatccagcaggcggtaagtgaacggataaggcacttcaccgttcgggccttccacgatgtcatctttcagcttcccgggaaccggctcttcaaagatatatttttctttcccgggcaggccggcgaggtctttttctgaaaccccaaagttgttggcgatgacatcaagcggtgtgtgggcaagccagtcagttacttggaatgtgctgttttctgagaaagaaccgtcatcaaaaaccaagaggaattcacagccttctttcagcgcctgaatggagtgcggcaggcctgacgggaagtaccacagatctccttccttcacgtcatcgataaaactgcgtccctgttcatcaacaatcgtgacccgcgctttgcccgtcagcatatatgcccattccgcttctttatgccagtgcagctcacggatggcgcccggttttaaacgcatgttgacagatgccagattttcagaaatcggcagctcgcgaacggtcacctcacgcgcgtatccgcccttttccagccggttgtgcacatctgagaaagagaatttcatattatccactgtgccgtgatccgtttccggcggcgtcagcatatccggattttggcggtctctttcaaggttgcgcggaatcgtgacggtcgctcctttgtctcctctgatcggctgcgggatattgcagttgttttcttttgacatgtaaatcgtctcctctcaagctttgttttttcagaaagagaatgtgaaaggcctttcgttttcccttctgctttgttaagtgatgcgttccgatgaaaagtcaacttcgtgtgaaaattaatttttcattttctgatctttcagttccgtcatcagttcgatcagggcgtcaaacttcttctcaaaccgtgtgagaagatacatggcaatcagagccggaaagccgagattgccgatctgtctgaccgcttcttctataaaaacctgatccattgtcagccacctcctgacttgacctgcagtcatgtatataagtgaaagaaagagcggctcttgtaaacctgatatcccgattgagggtcttttttttgttccggcaaaaccgggacataaggagtgcggaatcttagtcggaaaggagtagtttacttttttttgctttctttcatttaatttaaatagggggcggttttatggactatcaagttcttttacggtcaaaatgcaaggaaattatgaaacatccgatcgttaaacattttttaagtgacccaaagcattacgagaaatttaaaaatgtgctggaacattcagacgagaaggatgcaaaatcactggacgaccattttaaacagttttataaggaaatccggatcatcaaatatatgaactctatgatccggattttctccatcgattttgacaagcgcatccgtaaaaatcagaagcgctatccgctgacggtggatcagccggagggaggtgaagcgcttccctatgaaatgggaaaagacgcgtttgaagagtttctgcggaagcagggggatttgagccagcatgtccaaaaccgtgatttatacgaagcgcttcagacgttaaccgataaacaaaaaagcgtgctgacgaatatttatcttcacggagcgacgatgaaggagattgccgagtcgctgggtgaatcacggcagaacatttccaatattcataaaaaagggctcgacaatctcagaaagcagctggacaagcaaaaaaagggggaaaataagcagtgaacgggccatttgacttcaacaaagagaacacagataccgacgaaatggaacttttgatttcgcgtttttcgccaatgataaaaaaaaaactgagcaatacatcataccaggaaagagaagatcttgaacaagaattgaagattaaaatcgttgaaaaagcggacatgctgttatgccaggaagtgccgggtttttgggaatttattcttcatcttataaatgaaagctcctgacaaaagcggcggaatgatggatattccgctctgacaacgtgagaaaaacgagaagagatgtccggtctcgtttttcttttctgtttccccgcaagacctccgcactaaaaaggtaccaaatcttatccatataatgatatgatgaaaaaaacaaagagaaaggaacgtccaaggtggaaaatgcgtcaattttaattgtagacgatgagaaggcgatcgttgatatggtcaaacgcgttctcgtcaaagaaggctatcacaacattaagacagccggaagcgctgaggaagcgatcgagtttgttaaacatgaaaccgcggatctgctcgtgctggatgtgatgatggaaggcatgtccggttttgaagcatgcaccgaaatccggaactataccgacgctccgatcttttttctgaccgcccgttcttctgatgcggataagctgtcaggatttgcattgggagctgacgattatataacaaagccgtttaatccgctcgaattggcggcgcggatcagagcgacgttaaagagaacctataagcgcgaagagaaaacggcggtaaagacgtattcatacagccatttttcctattcgccgcaaaacgccgagctgatcgtcgggggcgagcccgtcagctgctccgcacagcttctgcagctgcttcaatatttctgtgaacaccctgatgtggtgctctcaaaagatcagatctatgaaaaagtatggggatatccgtcttacggcgacaacaacaccgtcatggtgcatatccgcaagctcagagaaaaaattgaaaaagaccccagcaatccgtcctatattgtaacggtgcgcggcctcggttatcggtttattcccgatcaaggagaaaaaggaacccgctcatgagaatgcgcggaaaatttctgctccactttttcggacagcttctgcttgtcatcctgctgatgtccgttttggccgtcgcttcttttttctatttggattggcgtttcagcgaagcggaagccaatgcgggactgaccaaagcgaccgcggactcgtttgaagcgtggcttgataaaaacgaagacggcacatgggatgtcgatgaatttttaaagatgtcggtccgaaagcagaagggctggcttcagatcattaatgacaatgaaaaaacggactacgcgtacagagtgccgaaagacgtcccgagccattacagcagaaaagatctcttatccatttaccagtaccggaattttgacaactacaagctgaattactggacggtcacgataaatgatgagacctatttgattctgttcggctggaaatccgccagtgagcagcttctcacatacatcgaatcacaggagccatccctcgcttccctttctcaatataaaaagagcacgattgattatattaaacgggaaaaaggggcggtctaccttctcgaagacagcggcagactgctcggggatatcaacagcacgaaaaaagaacggaacaccgtcaatgagcttgaattgctgaaatacagttccaagccgtggaattacaaacgggaaatttcttttaaaagactcgataaaacgaaatggatggtcgcgtcggtgccgaaccccgtgtacatccccgatcacgagtttaacaaatcatttttgagaaatgtgatgaaaaccctcttcctcttgatcggaatcttagtatttatgatctgcatcctgaccatctggtactctttccgtttcggctggccgctgtttcataccatcaaatggctcgtcaatttatcaaagggccggcttgaagagccgaagaaccgcaaaggacagccggtcagcaaaaacaaaaaaggcaaaacaaaacagccgttccgctttttcgccgagattttcgaatcgatggatcagctgaccgacacgctgaagcgggataagaaaaacagagaaaaaatccaggcgacaagggaagaatggatcgccgggctgagccatgacttaaaaaccccgctgagcacgatttacggctacagcatgatgcttgaatcgaagcaatacgactggaccccggaagaagtcaaagaaatggggcagatcgtccgggaaaaatcagaatatatgtctaagctgattgaggacttaaacttaacataccgcctcaaaaacgcggccctcccgatcgaacggcggctgatcaacgtcgtgccgtttatcagaaacgtcacgaacgatttcacgaaaaacacgttctcggaaggatatgacatcgcctttgaaaccaaaaaggaagacattcttttcgccattgatgaagcgtggttccgccgtattctggagaatctgctggcaaacgcggttaagcataataagaaagggaccgccattcgggtcgtgcttgaggaatcagccgaacagctcattctgaaggtgaaagataacggaagaggaatggacgatgaaacgattcaccagctgtttaaccgttattatcggggaacgaatacgaagggaccgtcagaaggaacgggactcgggctcgccattgccaaggagctggttcaccttcataacggaaccatccatgtcaacagcagaatcagcgccggaacggtgattacgattctttttaaaaaagattgagtttggacgccgctttgtcgggaataacaatagaagactgacaagcaaaagaggtgttcacacatggaagcagcattacgagcagatacgagagcagttatcggagaaggccctttatgggataaggacaagcaatgcctgtactgggtggatatactgggcagccagctgcatatcttcactccggctgacggaatcaaccgttccgttaaattcaaatcatttgtcacggctctggccttgtattcaaaggaagagctggtgatgacgatgaaagacggtttttacctgtacaatcttcgggaagatacattgacgaagatgaagcagccgaaagacatgcgggaagatatccgtttcaatgacgcaaaatgcgatccgtccggcagattatgggcgggaacgacgagcatggaaggcaaagaagaggaggcttcgctgtaccgtctgaatacggacggcagccttgccaaaataaaagaccaggtctccacctcgaacggtttggattgggatcgggaccgaaacctgatgtactatatcgatactccgacgcaggaaatcgtctgttattcatatgatcctgaaaccggagccgtatcagatccgaaaacggtctaccgctttccgaagtcgcaaggatctcccgacggaatgaccattgaccgtgacggaatgctgtgggtggctctgttcggaggcggccgtgccgtccggattgacccgtttttgcataaggaaattgcatctatcgaagttccggcgaaatacgtcacctgctgcgcgttcggaggcagagacttgaacacgttatacattacgaccgcgacggaaaaattgacggaagccgaaagacttgagcagccgcatgcgggcggcctgttttcagcagagcttgagacgggcggctgggagccggttccgtttgcaggcatgatgtaaaaaaaagccctggcatatggggaagttcccattgtgccgggcttttttgtgttaaatggagcggatgatgccgccttcaacccgctgtgcggtgccattaatggcagaagccgctgatgaagcgagaaatacaatcgtattggcgacttcttccggggttgcatagcgctgaatcaatgatgtcggttcattcactttaaaataatcccggacgaagctgtctgtgtcttctccggcagcctttgcggctccttccatgtaagaagcgacgccttcggtccatgtcggtcccggcagcacggagttgaccgtgacatttgtgcctttcgtcatttccgccattccccgggacaagctgattaacgccgttttcgtcattgaatacggaatcatttgcgcaagcggtttgacaccggcttcactggagatgttcagaatccgtccgctgtttctctcgagcatttgcggcagaaaacgccggcacaggcgcacggcgctcataacattcacttcaaaataccgagtccattcgtcatcagacacctcagcgaagtcttttacttcaaaaaaaccgagattattgacgagaatatcgacttccccgattacacctgcgcgctttatcaagtcatccgcctcatcctgacgcgataaatccgcagcgatgccgtggaccgttccgtaagcggaaagctcctcaaccgtccgttccacagtttctttttttcttccgtttataatcacctcggcgccttcggctaaaaagctttttgccgcggcttttccgatgcctgaggttgatcctgtaatcaaaacgagctttcgttcaagctgtaattccatgataatcctcctttttacaccattgtgtaacagtatacatgatgaattttagtgtgtacgaacaatttgctttcatgcaaaaaggccggatatacaagccttaaagacttatagtataattactgcgaaaaaaggatacgaatgtcaaagagacaatcgtttaccataatcagggggagttaaaagaatgaagaagatcactgccgtctgggcggcgcttttggtcaccgcctttgtgatcgccggctgttccggcgcacaggaagaaggaagcgcggccaaacaaaaagccgtctcaaccgaagcattcccggtaaccattaaggatgccgcgaacgaaaaagtaaccataaagcaggcaccggaaaaaatcgtttccctcatgccgagcaatacggaaattacatacgcgctcggactgggagataaggtcgcaggcgtcacgacaaatgatacatatccgaaagaagcggtaaaaaaaccgaaagtcggagatatgaatgtgaacgctgaaaaagtcatcgcgctgaagccggatctcgtgcttgcccacgcgtcctctatgtccgcttccgccgatgcgatgaagcagctgaaagatgcgggcatcaccgtcttaacggtcaatgatgcgcaatcgttccaagatgtgtacaaatcaatcagcatgatcggaaaagcggccggcaaagaaaagcaggcggataagctgatcaaatcgatgaaatccgacctttccggcatagaaaagaaagcggcggccatttctgaaaaagacgaaaagaaagtattcgtcgaagtgtctcctgacggctacacgacggggaaaggcacgtttatgaacgaaatgcttgaagatatacacgcgaaaaacgccgccggcagccagaccggctgggttcagctgacggatgaagcgattgtcaaaatgaatccggacgtcatcattacgacagacggcgtaaaggccgctgaagtggaaaaacgcgccggctggggtgccgtcaatgcggtcaaacaccacaatgtctattctgttgatcccgaccttgtcacacgctcaggcccgcgccttgtcaaaggggtcgagaagcttgcagaaagcgtttatcctgaaacgtttaaaaagtaaccgcccgctggcctacacggtcagcctgctgtttttagccgtttgtacggcactcggcatttcaatcggcagtctgcatattcctttatccgacgttttttggatcgggatcggccggacatcctcggctgaccctatgaatgtaaatattatgatgaatatccgcctgccgagagtcgttctggctgcccttgtcggagccgcgttatccattgcgggagcggcgtttcagggacttctgaaaaatccgctcgccgacccttatacactcggggtatcttcgggagcctcagcgggagccgttatcaccttgtttttcggcattcagattcccgtcctcggccggttcacactaccggttgtcagcatcgccgcagccattgcggtcatggcggcggttctgtttttcagccgcctcgttcatgcgtcgatgtcggtttcgacgctcattttgacaggcatcatcatgaattcttttctcggggctctcatatcgcttgtgatcgctttaacgggcaatgatctgctcccgattgtccgctggctgttaggaagcgtgtcaatgaggggctggggctatgtcgcgctgtttctgcctttttttctggccgggacggcgcttctgcttatcaatggcagagaattaaacattatgacttatggagaagaaaaggcaaggctgttaggcgtcagtacgggaaaaagaaaatggctgatgatcgccgccggatctctgctgacgggaggagcggttgccgtctcggggacgatcggatttgtcggccttgtcattccccacgtgacacggcttttgtgggggacggatcatcgccatttactgccgctgtcagcattgacgggcgccgggtttctcattttggcggatttgttttcccgcaccgtcattgagcctgtcgaattgccgatcggcattatgacggctttggcgggagcgcctgtgtttgccttgattctgcttcgccagcatcatggagggaaacgcttatgatcagggtgagcagcctgtccggcgggtacggaggccggatgattgtagaagatgtcagctttaccgccggaaaaggtgaatttgtcggcatactcggtccgaacggctcgggaaaaacaacgctgatgaaattgctgacgggaatgctctctccgtcaaaaggcgaggtgctcgtagcaggcaggcccgtcggcggatacaagccgcgggaacttgcgaaaatcatggccgttttgccgcagcatacggagcaagcttttacatttaccgttaaggaaacagtgtccttcggcagatatccgtatcaaaaaggactcttcagacagatggatcaacatgacgaagacattgtccgggaagcgatggaaatgacgggcatcgaccgatatgcgcagcaatccgtccgcaatctgagcggcggggagcggcagcgcgtctttctggcgcaggcgctggctcagcagcctgaggtgctgtgtctggatgagccgacgacctttcttgatctcaaatatcagaaagacctgcttgatacggtgaagcggttgacgagagaaagaggcctgacggtcatcagtatttttcacgacctaaacgccgcaggccaatattgtgatcagctcctgatgatgaaagacggacgcgcttttccgaagcagacgccggatcaggctttgaaaaaagagacgattgaagacatttacggcatcaccgtcagcgctgttgcccagcaatcgtcaccgaaaccgctgatcgctttcatgccggaagcgcaggaggaaagagagcctgtcaacgttccgttcgcctctctgataaacaaaagcggaaataccgtaacgcttcatacagaacggccgttcagaatgttgtcaaccgcatctgacggcccgggcttttcgtggagccgccggctttccggctcagcggccgctggtttgatctgccgtacgtttgattcggtcacaattgccgtgactgcgcagcataccgtttgggtgctgatcagcggacgtttatcggaacagggatttgtacggctgttaacggcagcggctgaagcgagaatgcaggctctttccggcagacaggcaaaaggcgacattgtcatttgcgccttgcagacaggagaggcgatggatgtccctcacgcggaaagagccgtcagaagaggaaccgcggcatgtgtaaaagcggcggaagaaggaggaatacaacgatgaagctgtatacgaaaaccggtgataaaggacagacaagcctgatcggcggcagaacggataaagacagtctgcgggttgaaagctacgggacgattgatgagctgaacagctttatcgggcttgcgcttgcggagcttgatgattgtgagaattgcggtgatgtgaaagccgaactccgaaacattcagcatgagctgtttgactgcggcggcgacttggcgacggtcactgaacatagaagctatacattaagagagacatctatttccgcattggaagactgcatagaccgttacacggctgaagcgcccccgcttgagaaatttattcttccgggcgggcataaggcggctgctcagcttcacatcgcgcggaccgtcacgagacgggctgagcgtctcatcgtgaaactcggcaaaacagaagagataaacgatacggtgatgcgttacttgaaccgcctgtctgattattttttcgcggcggcaagagcggttaacgcaagacagggcgttcaggatatagaatatgaaagaagcgccgcggtattccgtgatgatgaataatgttttgttcagccggcatcagcaagccggctgtttttttatagagatatccatcaattgaacctttattgacaggaggaaaatgtatcttatgcattattgactgaaaaattaaaaaatgagatattataagaaacattgtaaaataatgggggatttgatagatggatacatataataagagcgagagcatctggaataaaaatttcacccttctgtttatctcaaggctagttaaattgtcaggcgacggttttgcctttaattccattctgtggtttttgatttttgacggggaaggcgcgatcggcacgtccctgctcattgcggtcacgttccttccggaggcgatgctggcgccgattaccgggccttttatgaagcagcatacgctgaaattctggatgtatttctccgacctgacgcgcgcggcggtcgtgttgatcattccggtctgttactttaacggtttttctcctttatggtttgtcatgcttcttatgattgtgcattcagccacgggagccgcttataatcctgcatctatctcattaatccccaatattgtcagagaaaacagcctgcagaaagcgaatgcggtcatccagtcatcaggccagatcgtcaggcttgccgccattacgctgagcggggtgttcttaacatttatcagtcccgcttattctttgtttatcgctctcatattctatcttctatcaggttttctcgtactctttatgtcataccaagtccagcatgccaaacaggatacagtcgccgtcagacagcgcgggacgtatttcggaaggctcaaacggggtttcgttcttgtcaggaaacaccagattttatacccgctcgccatctattgtatcttcatgaattttgcggccgctccgtgggaggcgctctctgccgtttatgtcgccgaagatttaaacatgccgccgattatctactcgcttttgaaagcgacaggcacgggcggagcctttttaatgggttttattttggctaaggtgaaggtgaacaaatacggtctcctgtttgtgtcagcgggaatcatagaaggagcggcatttttcatcaccggcctcaacacttttctgccgctcgtcttcctcgccgcgtttgcgttcggatctgccgtcagcgcgattaatgtgccggaatatacgattattcagacgtctgtggaccatgatgaccagccgcaagtctatgccgtcatccatatgatctcaaacatatccattccgctcggcgcggttctttgcggatacgcggctaacgccttcggtcccggaaaagtcattgccgccggcggtctcgttgaagtcctgtccggtctcggaatattgttctttacgaagctggccaaagccgaacgctcagatctcatcagggaaaaagaagcgagcatcagaatatagatttttcgtgaaacgccctgcgccgtccggtgcagcggcgtttttttatgcgaaggtccgggggcttatacgactccggtctgatatgaaaatcaatctctgactcgttttgccggccgcgggatttgtttatagtaaagacaaggaaaacgaaaggaggatctgcatgaatataaatggcaaaacggcaggcggctttctgctgattgtgttcggactttctgtctttttcggaggaggccatttcgcatttatcatcccgctggcgatcggaggcctgatgctttactggggaatcaaacgtttttcaaaaggccgggcggtatcgggtatcatcgcgggcgtcatcggagctatgattctcgtcggttctcttccatttatcgttgcgatcggactggccggcgccatggtgtatttcgggtggaagatgatgaagcagggcggctcagataccgcttcccgccagtatgaaccggaagcggcatcaccgggctatcaatccggatttgactctgaatgggaagaatttctgaagaaaaaataaggaggaagacaaaatggtcttaaaaagaataagaaatatgttcgtcgcatctgttaacgaagggcttgataaattagaaaatccgaaagtcatgctgaatcaatatgtgcgtgatatggaaagtgacatcgctaaggcgaaacaaacgattgtcaaacagcatacgatcgtccatcagtttaagaaaaaacaggaagacgcctccgaaacggcggcaaaacggaaaaaccaggctcagcttgcttttgatgccggggaagaggagctggcgaaaaaggcgctgactgaaatgaaataccttgagggaaaagcggccgaacatgaaaaagcgtatgagcaggcgaaaacacagctggcagagctgaaagagcagctggaaactttagaaacgcgcctccgcgacgtaaaggataaaaaacaggcgctcatcgcccgcgcaaacgcggcaaatgcgaaggaacatatgaacgcttctttcgacaaaattgacagcgaaagcgcctacagagagttccttcgaatggaaagccgcattgaagaaatggaagtccgcgtcaaatacggcacttcagctgaggcgaacacagaatacagccgctcccaatattcagacgaggtggaagctgagattgaaaaaatgcgctcgctttctctggaaaaaacagagcgtcaaaaagcggctcatgaataatgtgcacaagggaagatcggcgcgtttacgcctcttccctatacgcacgtatcaattatccggcttttcctttataataaaatgaatgaaaaaggatggaacgtaatgaagcgtaagattgccaaaggactgatggcggcgtccgttctgatctgctgtctgtttttggtgaaagaagtgtttgccgggcgtttttttccgttgtgcgaaacagaagcggaatcggcaagcataccgccgcgtgccgtcaacagcctgtcggtttcatcggaacagacggatgtaaaaatcatcgcggaagcgcggaatgatatcgcggcaaacatgacgggatcggcggggaaaatgtttgtccaaaacaggggaaagaccctcaatctcaaagcgaaggagaaagggttccaatttctgaatctctttcagcgccctctgctgattgtccgcattccgtatgattatcatcgggatatcaccgtccatacatcaagcggcagcattgccgtcgacggaaacaaggggctgtctcttgcgcacctcggcgtccgttctgtaagcgggaacatgtcgctgaagcacgtgaagacggatgtgtttgaagcgaaggggctgtcgggcaatctcacagcagcaggccttgcggcaaaaacgggggctgtccgtttatcctcgggacatgtcgggcttcaacatgtggcgggcgcccttgacgtgcgggtcgcttctggcagtgtcgatgcctcgcttgagacggcggatgctcccgtatccgtcaggcttgcgagcggcagcgcagcgatcagcctgccgaaagacggaagttttacggtgaacgccgagacggcaagcggaaggattcggccgtcttattcctttgagaaaacgagtaaggaaggcggggcatttaccggcatgaaaggcagcggcgccaggccgattgatataaaagtgacgagcggcaatattgcactgcaatagtcaaggaaaggaggggcaagcagctgatggcaaaaaaacagattctcggacttatcatcgccttattaggtgtcagcatgtttttgcgtattatcggcatcggcgacttcttgttttggccgctcttttttctgatcacaggttatatttttaataaatattcccgcggctggctcggctccgtcctgtatatcttcgccgcttttttatttttgaggaacctgttcagcgccacctttaacctgttcggctatgccttcgccgcctttctcatatacgcgggctacaggctcctgaaaggaaagcgcgtgtatgaacataaagagaagaaaatcaatcttgaaaaagaagagcagccaaagccttccgcccagacggaaagcagacagccggacctccgcagcttttttatcggcgagctccggatgatgaaggacccgtttgagctgaatgatttaaatgtttccggattcatcggcgatgtgaaaattgatttgtcaaaagcgatgattcccgaaggagaaagcacgatgaccatcagcggtgtcatcggcaatgtcgatgtgtacgtcccgccggatatcgaagtgtccgtcagttcatcggcttttatcggcgatatgaacctgctcggctctaagaaaagcggcatgagcccgaatctgtataaagtatcgtctgagtacggcgactcgccgcggcggattaaaatttcaatttcgttattcatcggcgatgtggatgtgaagtatttatgaggaaaaaattactcgccaatattcagtggcgcgccatgcggatgaccgcgggactcagtctgctcctttgcgcggtgtttattacgctgatgctgctgtattacgggcttgacccgatgctgctgttttcttccggctggttcggtattccgtttgtggtcatcctgcttttggcgtctctttcggcggggttgatttccggttatgtatatggcggccgcctgaaaacaagaatggatacactgattgaagcggttttgaaatttgaaaacggcaattttgcttatcgggtgccgccgctcggcgatgatgaaatcggtctggcggcagaccaactcaacgaaatggccaagcgggtcgagctccaggttacatcgctgcaaaagctctccaacgaacgggcggaatggcaggatcaaatgaaaaaatcggtcatcactgaagaacgccagcggctggcgcgcgatctgcacgatgccgtcagccagcagctctttgccatttctatgatgacatccgccgtcttagagcaggtgaaagatgcggatgacaaaatcgtcaaacggattcgcatggttgaacatatggcgggggaagcgcaaaacgagatgagagcgctgctattgcatttgcggcccgtcactttagaaggaaaaggcttaaaagaagggctgattgagctgttaaaagagttcaaagcgaagcagccgctggatattgactgggacatcagcgatacgggtgtgtcaaaaggcgttgaagaccatctgttccgcatcgtgcaggaggcgctttccaacgttttcagacattcaaaggcgaccaaggtcaccgtcaggctcggcgcgaaacatcaaaagctgcagcttaaagtcattgataatggggcgggttttacgatggatcaagtgaaagcatcctcatacggcctgcattccatcaaggaaagagcgagtgaaatcggcggcatagcggaaattatctctgtaaagggaaaaggcacgcagatcgacgtgaaagtcccgatttatcagaaaacaaaaggagagaacgacagtgattcgagtgttactgattgatgatcatgaaatggtcaggatgggtctggccgcatttttagaagcacagccggacattgaagtcgccggtgaagcatcagacgggcagcagggcgtcgatctggccgcaaagcttttgccggatgtgattttaatggacctcgtcatggacggcatggacggtatcgaagcgacaaaacagatctgcgcgacactcaatgacccgaaaatcatcgtgctgacgagctttattgatgacgacaaagtgtatccggtgatcgaagcgggagcgctcagctatttgctgaaaacgtccaaggcggcagaaatagccgaagccatcagagcggctgccaagggcgaaccgaagcttgaatcgaaggtggcgggaaaagtgctgtcaaggctgcgccattcagagaatcagcttccgcatgaaacgctgacaaaaagagaactggaaatcctctgtctcgtcgcggaaggcaagacgaataaagagattggtgaagagctgttcattacgattaaaacggtgaaaacccacattacgaatatattgtcaaagcttgatgtcagtgaccgcacgcaggcagccgtatatgcccaccgcaatcatctcgtgacataagaaaaggagagcggtgccagcacactctcccgaggaacggggtcattgggacattccctttgttccgaaatccctgatggcgactttgactttgtattcaatatccgattcactgaagtgatgatcccagtcagaggatatctttttccatttatcgggataatgaatccggacttgatcgcctaacccggtaatatccactttcaactcatgctgcatgtaatcaatgaatgccatgacatctgaatgaatgctgcgttttaccgcgtttttgatttcatttatataggactccttgaaggaatcttctttcgggttccaatcctcagatagacggccttcaacaaaccgggtaacgataaacttgaattttccgtttttatattgtgtttttacatcatatttgctggaaaatacctcgaaagacaaataataattgtcatgctttgcaaacgtaacgcctccctttaccgtgcctgtgaacaggttcatattctggacttgtaaaggagttagattcgcataccagaatttatttttaataatggtagcgccccagatttccagtctgctgcccactttgcgaacttgaggaagggcaaaggtctcgcccttggcgattctctcggatatttcccccaatgtcacgggctccatcatccggatggtgaccgcattattctccgttaagtcatagatcgtatttgacgcaggctctccctggtcactgattttgaaaatatctttcgttttatccggcaccgtcatcacattgcagcttcttctcgtaccgttgtccctgataaattggttcatcaatgcgtcaagcgggatgtcgtcctttaacagcgcctcggaaaacagcatgatacgcaagtgctgggagaaagcggggtgattttttaatgatgccgttcgtaaggcttgatggacggtttctccggaagtggaagtcacctttgtcgtgtcgctccctgacgacgactgctgggaacttgctttttgcggaaccagaatctgctgcgtcacttccacgttttcttcctcgggtttatcgagcccgacgccgataacgagactcaaatcttctatattgcggctgtcccagcatccggccaaaagcaatgtgcaaagaatgattacgatatatttcttcattgcgcttttttcaccttccttttcacagcgacgactgcaaacatcagtaaaggcagcaaaaagaaaaccaagaagatatagccgagaatatcactgaacagcatcagcttgttagcgtcttttggcatcaatgatccgaagaatgtcgcaatgcctacgaaaatgatgccctttttgtgcttcagcccgaaaattttattaagacccgatgtcgcgaaatatccgtacgatacataggtggcgaaaaattggataatccagacggcaagcaaaaaagactcgaatctttcgataaaaagccctttgatttcaaatgattgaaaaagcgcaatcgtaggccagatcattgttttgacatcctgggtggttaaggcgccgacgacgagcacgtaggtaatgatgtataaaataatcgggatgccaaagcccatggccgacatacggaacgtgtgctttttatttttgatgtgctcagggagaaacagcataatctcaattcctaagaatgaaacagaaacgacggtcaaggaagccataacgggagaaaacccctgtccgagcaccggccgcaggttgtccagatcaaatattttaaagctgaaagaaaacaccaccagcaaaataatgatcgtaatcgttaaatagaaaggaaagagcctgccgagatcgctcatgccgccgataattaaataaacggaacaggcgataaagataaacagcgtaaccggcacgggcgttctctccaataaaaagaacttgaccatttccgccatcgcccgggcttcgaagctggcgactcctataaaatagagacagatcataagattgacgatatttcccgcccatttgccgaggccttcgttcatataatcaaacaatgatccgtactgatgctttttcataatgagcgtattgagataaatcaaaaagataaagatgaagccttccagacataatgcaatccagccgtccggcgaattcgcccttgatgacagcgaccgcggcatggtaaggagtcccgccccgagcatcgtgttggaaatcaatgccgtcccttgatagcttgtaagcttattgagagttgttttctggctcatttacgtttttcgcctcttttggttgatttttaatagggagacggagaatagagtcgtttgcgttttttaagctgaaaaatccattcggcgagaaatacggagaaccgaagcttcgctgtctcgataaatgagtgtagatcgccagcataaataaaatcatgccgtacagcccgaaagctgcggcggtaaacatcgaaatgaaacggagcacacggaatgacagacccatcccgtactgcggcaccgtaaatgaagcaagcgcgacaatgctgaccacgatgaccatgatggagctgacaatattcgcttcaacggccgcctggccgatgacgactccgcccaccaatccgatcgtctggccgagcgggctgggaagcctcaagcccgcttctctcagcagctctatcgtaatttccattaccatcgcttcaatgataggcgggaagggaacgttttctctgttcgccgcgatggtgactgcaagcgatgtcggcagcagcccttggtgaaacgaaacgagggcgatataaatggacgaaaaaaacagcgtaataaaaatagacgtaaaccgcagcacccggatgagcgaggcggaaatccaccgttcataataatcatcgggagactgcattaaaattcctaaagaagccggaaccaccagcgcaaacggcgagttgtcgacaaggatggcgacgcggccgttgaacaaggcggaagagactttatcaggccgttccgtattttgtatttgcggaaagggcgaatacttattatcctcaataagctcctcaagcgttccggaatcctgaatgtcgtccatcttcacttcgctgaggcgctttacaacatcgctgacgacagatgggtccgccttatcatctatgtacatgaccgtggcgtattttaacttattttctccgatcggaacctttttcgttttcagcttcggatggttcgtgcgctgcctgatcatggcgacgtttgtatcagaatcttctatgaaggcgattttcggacctcttacgaccttttcggatgtgggttcattcacgcttcttttttctctttttcccgtggacaaaatgtatacgctgtcaagtccgttaataaataaggcgcattttccccgcagaatggagatgacggcttccttcgacgtaaagacgggacgggcgtcaatcttatcaagacgtttcgacaccgtatccagcgtcagagtgtcttcttcccgaagcagcgtttcaatcgcttcttttattttgtcttcatcgttcatttcactcagatacatataataaaaaacaagcccgttcggaagcatctttttattttgaaccaggtcatcattctgctctacgtggggaagcaccagtgccaggttaacgtgtatgtattccttgaattccgattgcgccaacgacagtcacccgccttccaatccttaattgaggttatcttttcctgttaaaaaaatgatatactatgataaagtatttaatggtacaagtttttttatgaaagcggaggagagatgtggcacaagtcagactggcaggaaatgccgaagaaattgaacagctcatcaaatcatttgaggcgcattacgaagtggcttacacgtcgaaagaataccgtaaaacaaatccgaagtataaatactctaaggattcgcgcgtctatcttgagctgaaattaaaaacggccaaggccgaaaaataaaaagggtttcatctgttactggcgaataatactcagggtgaagcaactgttatggagggatacataaatggactacagaattgaaaaagacaccatgggagaagttaaagttccggcagataaattttggggcgctcagacacagcgcagcaaagagaacttcaaaatcggttcagaaaaaatgcctcagcgtgttgtgaaggcgtttgcaatattgaaaagaagtacagcgatcgccaacgaacgcctcggcaacttagagtctgaaaaagcacaggcgattgccgctgtatgtgacgatgttttaaacggcaaatacgacgataactttccgctcgttgtctggcagacgggaagcggcacgcaaagcaacatgaacatgaatgaagtggtggccaaccgcgcgactgctttattgaaagaaaaaaattccgagctgaagattcatccgaatgatgacgttaaccgcagccaaagctcaaacgatacattcccgacggcgatgcacgttgcggcggttcttgccgtatatgagcagctcgttccggcgcttgatcagctgcgcgcgacgcttgatgaaaaagcgaaagcttatcaggatattgtgaaaatcggacgcacgcatttgcaggacgccactccgctgacgctcggacaggaaatcagcggctgggtatacatgcttgaccgttcgaaagaaatgattcttgagtcaacggaaaaaatccgcgcgcttgccatcggaggcacggcagtcggcacgggaatcaacgcccatccgcagttcggtgaattcgtcgcggaagaaatcacaaaagtaacggggcagacattcaagagttcgcctaacaaattccacgcgctcacaagccatgatgaaatcactcacgttcacggcgcgttaaaagcattggctgccgacctgatgaagattgccaacgatgtcagatggctggcaagcggcccgcgctgcggaatcggcgaaatcgtcattcctgaaaatgagccgggaagctctatcatgccgggcaaagtcaacccgacgcaaagtgaggcgctgacaatgatcgccgcgcaagtgatgggaaatgacgcgacaatcggatttgcggccagccaaggaaacttcgagctgaatgtcttcaaaccggttattatctataacttcctgcagaccgtgcagctgctcagtgacggaatgaattccttccatgacaaatgcgctgtcggtattgagccgaaccaagagacgattcaggaaaatctctctaactcattaatgcttgttacggcgcttaacccgcacatcggttatgaaaacgccgcgaaaatcgccaagcttgcccacaaagaaggcctgacgctgaaagaagcggcattacagctgaaccttctgacagaagaacaatttaatgaaatggtgcgtccggaagatatggtgcacccgaaagcataaaaagaaagaacggctgcagtcattgcggccgttcttctaaataaactgctgtttcagtaaaaatctgagctgttctgcatcttcagccagcaggtcggattccttcaaattcaaaatcattcctttgatgattgccggtttcggcgactttttcttcatttccgcttccagaatatccaagctctcggtgaattcagatgcttgcgtcttatccatcgtgccgatgcgcgtgcggagggtctgcaagatcgattggcttaaaggatcgggctgcccgttatgaaggggcccaaacagtgagcttgcctcatcaagagaaataaacgcttcatcatgtctgtccgccattccgtttacgatgtcatcaattctgtgaatcacggtatttgccaaaagcgaaggctgtacggaccggccggtcagaatgagatattcaagatacatctgactgattccttctattaaaaaacaaagctcggctgtgtatggttcagctttttctccgtaaatcgcaagaagactgtcgatatgaaactgcaggatcgaccggcggattctctttccgcactgcgccgcttcttcggtataaggaagtgaaccgtctttcatctgcacggtaataaaatcctgatgggcgagaatcgattcgtaaaacaccgcaagctgtttttggtaagcggctctcggactgtcaccctccgtttggatcgtcgtgattcgggtaaacgttttatcatagtagtaattcagcatggataggagcagtgcttctttggaaggaaagtaaagataaaaagcgccttttgagattttgcattcatcggcgatttcctgaaccgatgtagatttgtacccttttcgggcaaacagtttgattgctgcttcaatgatcagcttttctttttccttcaatggttccaccctttcggagccaggaggctggcttgtgcttctcatgtatgactatatggtcatattgatattccgtaaatttaacctgattgtaacttgtttttttgttttgttttatttatattataaagtgagctgaccgaatggtcaaagttctggcgaaagggtgaatctgaaaatgaaagaattagatgaaatgatcagccgcttgcgaaacagaggaattaaagtcgaaaaggtgaaatatccgaaaaagacaatttgtgaaaagaaatgggttcatcaatgccaaaaaccgctgaaagcaaactacagagattttaacggctattccttcacataaaaaaagactgcaatggaacactacagtctactttggtatgataattcggtagattacacccgattggtcattttcaattgaaattgatgctttatgcaaggttaaaatccgttttacgatgctgagtcctatgccgaactcgcctttcttccctttattaaaaggctcgtacaagctggatagcatctcatcctcaatcggaggcccgtcattttcaaccgtcatgacaatctgctgctgattttggctgatccgaatgtgaatcgccgtttctgcatagcggatttgattttcgagaatgttttcaagaagtttgctccattgttccggatcaccaggcatcattaatgcatcttctgtatcaacggtccacgataattccttccgggcccatttgagccgttcaatgacttcttccgtgaccttcacaatgtcaaatgtctcatggtgcacccgctgcttcattaaataatcaagcttcgttaaatataataaatccttaattttcttctcaagtttttctgcttcgccttcaatgacatcaattgtggtttccagatcccccttaggaaaaatcccgtcctttattgattgagtatagccccttatcaccatgacaggcgtttttaaatcatgagagatattttgcaggagcgttctttccgtttcgtctttttgcaccagcttgctccgcatgtcttcaatggtatggcctaattttccgatttcgtcttttctgtcgacgatgaccggatcatcccaatcctgttttgaaatccgtttgacatgcttctctaaggaaacgagcgggcgcgagagatatttggcaagccaaatcgccggaatccagcttaacaaaatcacgccggcaatgataaagagcagctgcttgaacagggtgaatgccagatcatcacgataagaatcaagggcgtaagacagcatcatcgcatcctggccgttaatggtgaggccttttttaatgacgaaaaacactttttcaccgctgatgtccgcgctgtatcgtttcgtgacgctgtgctggcggcccgcgagcttgtacaccttatggataaaggaagaagaaaagtagttcaagtctttgtcactggccgactcctcccgttccggcagaagaacgtgctgaacggatcggaaagtcgtcggcgcggtcgcatcctcgctgtaatatccccgctcgatcgatccgggcagccggtactccgtcagtacatgctgttcattttcaatggtcgtatacgtttcatccgtgaaaaaattacgcagcgtatttgagaacagcacgagaagcagaatcgaaatggctaagaggatgcctgagatgaccacccatatttgaaaagcaagcggcttatttttcatgacgtcatcatcctgtagccgaatccgtaaatggtttcaacctttaacccgggcatttttttccgcagcctccgcacaagatcatcgaccacccggtcagtgccgaaataatcatggccccatatattcagcaggatatcttctctggaaaaggggtgtcctttatggtgaagaaataaaagcagcagatcaaattccttagacgtcaaattgaccaggctgccggtttcatcataaacctctcgggcatcttcgatcacattgtaggaagaaacggtgatgccggttttctttgcggcgggctgttctttatacacgagctcgagcagcttctggacccgtataataagttctctcggcaaaaaaggcttggcgatataatcattgcttccaagctctaacccgaggactctgtcaatatcggcatcccgcgcggaaatgaaaataaccggcacatcgggatctttttcttttatttcttttatcaatgtatagccgtccgtatccggaagcatgatgtcaagaatccacaagtggggagacggctgcatctgctttctggcatcttcgccttttgtgaaagatgtaatgttccagccttcattctctaaatattttgtgagcagttcattcaggttatcctcatcttcaactagataaatggtgtatgacaaggcatttcacatcctttcaacgtcattatactagttttaacatactcaagccgcattttcataatttcacatattcttttcatttttatcccacaatgtttgtttatgatgtgtataagggaagaaaggaagaaaaaaagcggggaagataacatgttcaaacacattttgttttggagctttgcttttctccttattattgggacaatagaacttgtacatgcgatgaatatgtaatcgatagaatgaaaacatgctgaaggagtgtgcgtgaatatgaacgatcatcgagatgacggcagaagccgcgatcagtcagatctttcacatacggaacaaaacagaaatgaacagcagcagatcagccatcaggagcccgagctgctcgaaggcccagtctcgaaagaagcggaaaacgagacggcggccggtacggaatttgaaaaaacggctgccgtgaaaaaagaaaaaaaacggagagccgcttggctgagcccgattttaggcggcattatcggcggaggcctcgtgcttggcattgtgccgaatctgccgagtgagcagcataagacagaagccgtttctgatacgaaacaagttcagtcttcgaattttaggtcaacgcctttgaaaaatacctcaagcgtagcggatatggtagaagatttggagcccgcgattgtgggagtgtccaactaccaagcttcgcaaagcagccagttcagacttgacggcggttcaagctctgaaacggaaagcggcacggggtcaggcgtcatcttcaaaaaagacggcgaaaaagcgtacatcattacaaacaaccatgtcgtagaaggtgcgaacaaactgtcggtcactctttacaatgggaaaaccgaaacggcaaagcttgtcggaaaggatgccatcagtgacttggctgtattggaaatcagctcgtccaatgtcaaaaaagcggccagcttcggggattcctccaagctccgcattgccgataaagtgattgccatcggcaacccgctcggccagcagttttccggcaccgtcacacaaggtgtcatcagcgggctgaacagaacggtagacgccgatacatcccaaggcacggtggaaatgaacgtgattcagacggatgcggcgattaaccccggaaacagcggcggcccgttaatcaactcaagcggccaagttatcgggatcaacagcatgaaagtcagtgaaaacggcgtggagtcactcggctttgccattccgagcaatgatgtagaaccgatagtcgaccagctgcttgcaaaaggaaaagtcgagcgcccatttttaggtgtgcagatgattgacatggcgcaagtgccggaaacttatcaggaaaacacgctcggactgttcggcgaccagctgtctaagggtgtttacgtaaaagaagtgcaatccggctcaccggctgcgaaagcgggcatcaaatcaaatgacgtcattgtacaattgaacggcaaagatgtcggcagcagcgccgatatcagacagatcttatataaccagctgaaaatcggcgataaaacgactgttcaagttctcagaaacggaagcaaaaagacgctgaacgtcacattaacgaaacaaaccgaaagcgcaagctgaacgcataaaaaaagctgaaccttcaactgaggttcagcttttttcgtcattctcccaagtaggctgacagcatccacacatgcttgtccgcttcttcaactaatccgacaaacaggtcggcagttgacgggtcattttgttcctcggcgatgccgatgacaaattttgattcgcggctgatttgtttatagtcttgaaccagtgattccaccatttcagaagccgttttttcctggccttcatccgtaatggaagcttgttcaaggtaagtgtgtaaagtcgccgcaggctgtccgccgatggccagaagtcgctctgcgatggcatccgccgtttccgccgcttcgttatatagctcttcaaatttttcatgaagcgtaaagaaatgagggccttttacataccaatggaagcggtgcagtttagagtaaaggataaaccagtttgataattgtgtgttcattgatttctcaacaagagtttcagtttttttcgcgttttgtgtattcatattcatcgtcctccctgtgatctgataatttaattatatcacatattaaataaaaatcaatactaaattataataattataatttaggtttaagtgaacagctttttctttataatcgattcccaggcggaccacggaaagagtgagcggaaagccaatgtcagcttaacgcccctgccgatcggataccgcagtttcttcagccgtttcctttgtgccaattgataaatcagctccgctacgtcatcaggatcgccgcttttggatgcgttggctttgaagtaagcttctatttgctgataatagcggtaataaggcgaatctttgccgggtgccgtaagatgattggagagagacgtttcccatatagatgttttgtaggagcccggttctattaaagcggcatcaattcctaaaggcagcagttcgaggcgcaggctctctgtaaacccttcaaccgcgaatttggaagagacatacggagatagagccgggaaaccggtcagtccgctgatactgctgatattgaagattttcgccccgctatgttttcgcatataaggcagcacggtttttgtgacgtgaatcagaccgaatacatttgattcatactgctgtctgtaatgttccatcagcacatcgtcaataaaccccccgtacgcagtgccggcgttattgacgagcaggtcaatcggtccgaaaccgctgatggtgttcccgaagtcagacaccgactgctcatttgtcacatctaaagaaacgaccgtaacatgttcggatgcacccgcttgagcggcggcctctttcagtatttcagctttctccggctgtctggctgttgcgatgacgtgataagaccgggcgagcttcagcgctgtcagcagcccgaatccgctcgtcgcgccggttacaatggcaatttttctgttcatcttataatcctccccgtttgttcttatctcatagtgtataacatctcgcggaaagaaggagaaatcgttcggaaatatgtcagaattgttttataatggagtcagcttcggatagaaaggggtaaagaaaagatggcattagagggattgaaggaaacatgggatttaaactccatttttgagggcgggagccggtcggaagagtttcagcaatacatacaagagctcaaaaatcatctaagcgcttttcaacatgcggttgaagcgtttacagctccgacgcatgcggatgaaagccgggagctgatcaatctgattgataggtttgaacggtcagcgatcatgatcaggcaggcgggagcgttcgtcggctgtcttcaggctcagaacactcatgatcagaaagcgaatgaatggagggcgcggatcaatcagctgagcagtgattttaaatccgctctggtcacccttgacgatacacttgcccggattgacgagccggtctgggaggagctgctgcaaaaaccggaacttcaggatctcacatatgttttaaatgaaagaagagaccgggtcaaagagaagctcagcgcttcagaagaaaggctgattgaaggcctggccgttgacggctatcacgcatggggcgacctgtataatgcggctgtcggcagaatgaagattccgtttgaggataaagagctgtcggtcggccaagcggaaaatatgatggcgcacccggaccgccgcatcagacatcaagtgttcaaagagcttaatgaagcgtggaaaggagaagaggagcttttcggcagcacgctgaaccatctggccggcttccgcacggaaatctataaagcgcggggctggaaaagcgctttggaagagccgcttgcgatcaaccggatgaaaaaagaaacgctggatgtcatgtggcaggtcattaccgatcataaaaagccttttgccgaatacctgaatcgaaaggcgtctcttttagggcttgagcggctgaactggtatgatgtggacgcgccgatcggcgaggctccgaaagaatatacatatgatgaagcggccaatctgatcgtcagccaattttcgacgtttggcaaaaagctgtccgcatttacggaaaaagcgttccgtgatcggtggatagaagcggaagaccgcagcggcaaacgggtcggcggtttctgcaccagctttcccgacagcggagaatcccggatttttatgacgttttccggaagcgcttcgaatgtatcgacgctggcgcatgagctcggtcacgcgttccatcaggaggccatgcttcaagtgcggcagctgaacagagcctacgctatgaatgtcgctgaaacagcctcgacctttgcggaaatgatcgtcgccgacgccgctttgaaacaagcggagacaaaggatgaaaaggtgttcttgcttgaagataaaattcaaagaagcgtagccatgtttatgaatattcatgcgagatttttatttgaaacgcgtttttatgaagagcgcaagcagggcgtcgttccggctgagaaactgaatgaactgatggaagcggcgcagaaagaagcattttgcgattcattaggggaataccaccctcatttctgggcgtcaaaactgcattttcatattacgggagtgccgttttacaactttccgtatacgttcggttatttattttcgcttggaatatatgcaagagctcttcgggaaaaagcggattttgaagaaaaatatatcgcgcttttgtgtgacacggcttcgatgactgttgaggatttggcgatgaagcaccttggagcggatctgacggaacggtcgttttgggaagacgcggtccgccttgccgtacaggatgtgcaggaatttttagagctgactgaatgataatctggagatgaaccggccggagtgttaccgctccggctcttttttgtttaatgaatgacagccgcctcccttggaaatacctaaaaacgatcggaatggaatgggagtgaatcgcatgaaatggatcagaacggcgggcgttttatgtcttacgctgatgctgattgccggctgccgattgaatgaagaaaaacgggaagcggaacaagacagcacacccgtgtcatccgcgaagccggttccttacagcagctttgcccttcgcgtcagctacggagccggagagcataaccgctatgaaggtttgtatgagagaaaaggcggtcatgaaaaggctgacatccgggacaagctctcaggggttcacagagagggcgaggaagcgcttgatgaaatgaagatgatccttggagaacttgccgtaaacagccggatgaaggaaagtgaggtcgtccggcaggtgctctcggcttttaatttggacagccgctatgaccatttttatctgaaactgaaaaagaatgatggagaaatgacggaaataaaaaaataaccgccgtccgctgcttttttgcccaaaactaattgataatgatattcagagtcattaatttctgttacaatataatcatgatctcacgttgaatgtttaggcaatttgtttatatacatagtgttgggaaactcaaaaaaggagcggttagcggtatgagtgcaatttctacagagacgctgagcttagggtacggagagactgttatcattgacgaattggatgtcgcgattccaaaaggcgaaatcactgtattgatcggaagcaacggctgcggaaaatcgacgcttttacgttcattggcccggctgatgaaaccgaggggcggtactgtgcttttagaaggaaaagccatcgctaagcttccgacgaaggaagtggcaagagagctcgctattttgccgcagagtccgtcagctcccgaaggcctgacggtgcatcagcttgtgaagcagggaagatacccttatcaaagctggctgaagcaatggtccaaagaggacgaagacgcagtggcaaaagcgcttaaagcgacgaagcttgaggaaatggccgaccgtccggtggattccttgtcaggcggacagcgccagcgcgcatggattgcgatgacactcgctcaggatacggatatcattctgcttgacgagccgacaacctatctcgacatgacgcatcaaattgaaattcttgatttgctgtttgaattaaatgaaaaagaaaaacgcacaatcgtcatggtgctgcacgacctcaatctggcatgccgttatgcccattatctggtcgccattaaggataaacagatttacgcagagggccgtcccgaagaagtcatcacttgcgagcttgtacagcaggtctttgcgatgaactgccaggtaacgcaagacccgctgttcggcacgccgctttgcattccgcacggacgcggcagatgtatcgtgcaggaagcggccctcaccgcccgattgtcataatcatgaaaaagggaagggaacggtatggaagagaaactgcagcagcagctggacggcctgcttgagaaatacacggaactattgcttggcgaaacaaacccggatgtaaaggaagaagtcaggcagtggattttgtatacacatatcgcaaaaagcatgcctccgctcgtcaaacattggaatcaatcctacccggacgccaaagagggcatcaaagctgcgatacagcatattaaacagctcaatgaagcacacagaaaaaaacaataaaaaagctttcggcatcaaagagaggtgccgaaagctttttttgctgaaaaggaatcaataaaggcgccgttcaattcatagcgaagaacattaatgtaactaatgcacccgtttgtttacgtatatttcttccgcttgctgaaccaagaaaaaaggaccgccgcagcaatccctttctctctttcctatatatcacatttcctttcggatacgtaataactcttcaaatgcttttatatttgtatcaaaattgggcactgtttgagattcctcggcacatttgacttgtgctacaaccaaatcatgaaaaggtgttgaaatgcccgtaccttctgccattttgggaataactccattaatataatcaatttcagttttgcgttttttctcaagatcctggagcatacttgctcttagcagcctagatggtgccatggctgacctaaaagtttggatacgttcaggaatatcattttcacttcttaattccaaagattctaaatcaaggccgcccattttcgcaaatttgacaccattggcgtgtccaaccttaatcgtctcatctgcgatatggactgcactaacaatgccgatttcatggtcaagaatgtctccgtattctccgtttaatgctgccgataaaccactgaatgcattattgataagtaattttgaccacttcgttccaactaaattatcggaaatatgtgttccgccgataaggtctaaaaccgatttaatacgctggattctttctgttgtttcaccatgtaattctccaatttgaaaagcgtactctttaaattgagtatactcagttgtaagtctggatacgcccggctcaataaacgtagcaccaaattcaacagaacctgcaataacacgttcatcaccaacgatcgaagcaactttctgttcaggtataccgttttgcaaggaacatactacactgtcatcctttaaaaaaggcagcaactctttaagaatggagtcattatataattgtttcgtcagaagtaatatgaaatcatacttgcctgacttgttttcaggggtaatggctttcacctttgcttgaaattccgttgtaccaactactttagcacctatttgatttaaggtatctacatgttctttgtatgaatcaatcaattcgacatccattccgccagcagacagatatgctccaacaatggttcctaaagaacctgctcctaaaactgcaattctcattgtcaacgctccttatttttcctctaagtagttataaaccggctgtgctgcatttaaggttaaatccgtaataatatgagatgctgaaacgacttctaatacaggcaaatctgcaagaggtgccagagcatgttcaaataattgaagccgcgccggtccagtccaggcacctttaacttctatattcgttatttgcgtccgcaccaaatcacaaacccttaaatcaccattgtaatcagtggcaatcttaaccataaaattaggtcggcaaatttcccttttcgctttttccttatccatttcgaaatgtttatatcccatagtcgcagttgccacacgaagactgccataatccaatgtgccaacaagagtatcagagtctatatacagcttaggggcacccaatttctttggatatgcagtaagttcccgtccgcttgcaatagccgggaaattgtcaacatacatagaatgtacataatctccttcttcaccattaaagctgacagggatgacttgtcctgcctctgtataggcaccaagtccggaaacatcgggcatccacatgacttcgaatttcactaaaggttcagtaatttgaagaggttccggcactgccgcacgtaaagctttttcatccgttcggtaaataatatttaaatattcacggttaacaaatttataatttgggataggataagcaggggctgttagtggcgtacttaaattttttgctatatctttcacatcaattttcattgaatgacaccctttccttttctttaactatgctattatcttacattcgcatttacatttaatccaatacataataaggtatatatatatttattgaaataaatgaggggggtgcagacagatggaattgctgcagctaaaatactttcagacagttgcctatactgaacatatttctaaagcagcagaacaattaaagattgcccagccttctttaagtctcactataaaaagacttgagaatgaactgggaacaaccttgtttgagagaaaaggcagaaatattaagctgagttcagcagggaaaattcttttaaaacatgtaaacaggatttttactgagattgaaaatgcacaaacggaaattcaattggaggaacatcaaatttctggcaccatcagaatatctatttccaatccaagattccttgcaggactgatgagtgaatatatcaaccgctctcctcaatcaaaaattctccaagcaatcggagttaaaagcgagatcataacaagtttaaaaaaaggggacattgatttaggaataacaggtcatccgattcaagatgaagagatagagagttgggtgctggtaaatgaagatattgttctggctttgccctcaaaccaccgatttacgggtaaaacagaaatttctttacgtcttgtcgccgatgaaccatttattacccttgctaataatgaagagtatagcggttttacagcctcgctttgtgagaaagctggtttcaccccaaatattgcatttgaggcagattctcatttactggtcgagattataaagctggatcaaggtgtggcgttgcttcctatttcagtttgcagaacattggggctgaattttataaaagtgactgatcactctgcttcatatccagtcggcttatcttggatgagacataagctattatcttcttcggtaagaaattttcgtgactttattatgtcgtactataaagataactatgaaatgtttaaggtttattaaagaattccatcactatttttttgaattttcaccccccatttccaatgaggcggaagactggtcattcccagatgatataaaaaaatcccgcggcatccgcgggatttttctttgttaaacggctttcgccttttcttcttgtttgcctgtctttttatttgtcagcttaattgatttaacaaacagcgtgaggatcaatccggcagcgataaaggccaggcctgtgaaaaacacgctgtgaagcgaatccatcagtgacgttttcaaaaccggcacgatatgggaagaaaatgcggccggaatctgcttaatcgattcctggctgaacaaggattgaagcagcccttcaggattcttgtcaatcatacctttaaactgggcggcaaaggcacttgcctgtttcgggagtgagtctaagtaaggcaccagtctgtcggttaaaaggcttcctgatctggcattcatgacagcgccgagcaccgtaatgccgaacgttcccccgatcatccggaaaaattggcttgaagaggtcacaacacccagctcttcttttgaaaacgtttcttgcagagcgagtgtgagaagcggcatgacgagccccattcccagaccgatcacggccatatagcatgtagccgcgagcttgcttgtatccagctgcaaagtcgttaataagaagaagccgacggccatgatcagcatgccgatcatgatttgcggtttaataccgatcttataaaccagctggcctccgataatacttgtgataatcatagataccatcatcggcgtcataatcgtgccggaagcggtggcgctgactccgataattccctgcataaagaaaggaacgaacgtaacggcgccgaacatgccgatactcatgaaaaagccgatcagattcagtacggtaaacgttctgtttttaaacaggtacatcggcagaatcggctcttttgctttgatttcagcgaaaatgaatccgacaatcccggcaagtgcaagcgcaaagagaccgagaatctgccaagagccccatgcgtaatcctttcctccgaagctgagcgcgaggaggaggctgacgattccgacgatcattgtgaaaatgccggcgatgtcaaagttaatcggcccggtctgttttctgccttgaagtcctcttgcgataaagatcacggctaaaattccgacaggcaggttgatatagaaaacccatttccaatttaatgagtcaacaatccagcccccgatttgcgggccgatcacggaagcaagcccgtaaatcgccccgaaaagcccttggaacttggcacgctgtttccctgtgaacaaatccccgatgacgatcatagccatcggcatcatgacaccgccgccgattccctgaagtccgcggaaaataatcagttccgtcatgttgctggccattccgcacagtgcggaagctcccataaaaatcaataaacctgatacatagacgacgcggcgccccaataaatctgcaagtttccccgcaatcggaacgatcgtcgtcgaagttaaaagatatgccgtggtcagccacgtcatcatgcttaatcccccgaggtcacccacgattttaggaatcgccgttcctacgatggtgccgtcaagggctgagaaaaacatggcgatgattaagccggttattaataatgtgcgttttggatctttcttttcaatgctcatgtttcggcagctcctcttttctattcgttttctttttgatcagccgcgtatttctcggctgcttccgctactttgcggatgatgttcacggactgaatcagttcatcgtcagtcagaacggataggtttcgcgccagtatcgctttccgtccttccacaacatcttcgaattttgtttcgccttttttggtgaggctgatgtcgatgacgcgtctgtcctgctggttatgtttgcggacgataagtcctttttgttcgaggcggtcggccatcagcgtcactgcactcggctttacctccatgcgttccgcaatttcggaaactttgcagctcccgtgttttttcaggctggctaaaacaaataattgggcaggcgtcacctcgtgttttgccatgctttccaccatttcaggctgtatgttttgcagcagcgtctgaagagatttctggatgtcagacacatattgatccgcgtttttcataactcctcctcatcttgttccttgggaaaataattaacattagttaaatataaataaggattaatgataagtcaatctttttgtgcaaaaataaaaaaaggattgatgcttgtcgaaaacatcaaatccttcttcgttttactgctggtagggagactgctgctgaatggtctgccggaacttctgatacgattgctgaagcttttgggtatcggctgcttcaatggaataccagccattttgaaacatcacatcgtataatcttctttgcgctttttgtgactcatcgaaaatcgcctgaatatcttgataaagagactcgtggctgaactcgtgcagggctgtgcaatatgaagccgtgatgtatttttccgtcgtcagcagctcattcaccaagtctctgtcattcatttgcgccgtattgggcacaggcgtttgcggattcgtgattttttggttttgctgttccatgtattgtcctcctattgcatatagcctgttgttgtctgtccgccttgatcggggttcaagcggcctaatatgtgctgataatgcttctcatgcatccggccgatctgatcaagctcttgttttaacgtctgattctggcagtgttccgccataaaatgcgcttttttcatggcaagcagattccagttcagcatgtcctcaagatacaaatggtctttcgttgagatgacggcaggcggcaagtttccgtgctgctcttggttgttcatttaaacgcctccttcaattctgttctttttagctttctctgcgatcggaaattcatacacgaataaaagaaaaaggagggagttcatccttgctgcggagcatatgtttatttttgtcgaaaaataaaatgcttacaaaattcgcccaggcttacggaatccgcttcggtgcgggaaggttcgttgcaggggaaacactcacggaagctgtgaaaacggtaaagcggctgaaccaaaaagggctgtcggcttcgattgattatctaggtgaatatgcgggttcagagaaggatgcgagaaggacggcggaagaatgtaaaaaagcaatcagggcgattgccgagaatcaactggattgtgagctgtcgctgaaattaacatccatcggtctggatatttccgagaagctcgcggaacagcatgtcagagacatattgacggaggcaaaagaacgctgcgtgcctgtaacgattgatatggaggactattcaagatgcagccgtacgcttgagctgtataagcggtgcaagccggatttcccgatgctcggcaccgtcattcaggcttatttgtaccgcgcagctgaagatatcagcggtctgatgccatacaagccgaggctcaggcttgtaaaaggcgcttataaagaatcggcggccgttgcattccctgataaaaaagcaaccgatcttcattttcagcagctgattaagctgcagcttttgagcggccatgaaacggcggtggcgacacatgatgatgacatcatttcttatacgaaaacactcatcagcgaacatcagattccccgggagcagtttgaattccaaatgctgtacggcatcagaacggagcgccagaaggagcttgccgaagaaggatacaggatgagggtgtatgtcccgtacggaaccgattggtacgggtacctgatgagaagaattgccgagcgcccggcaaatgcggcatttgtgctgaaagggatcttcaaaaaataacggctgctccaaaaagcagccgcagcatgttattccatgttgtcttttttatattgctgattttggctcgtccgtttgccgccgccgtatttttgtttcggtcccgcatttcctttcatgctggccgcgctcactgcggcagaagacggatcttttctccctcgcaccattcccttcacctccgggtttaagtttcccgcccgcgccatggaacatgcggaagcagaaaaatttaaaaaaattccatatttgctattgaagtcatcctgaaaatcttttaagatgaaagaagaaaagggtttcattttttttgccgaaaaaatgaatgactattcattcaaagttcaagggggatgactcatgcacaagtttataaagaaagcagccgttctcggatcaggcgtcatggggtccggaattgccgcgcacttggctaacatcggaattcccgtcctgctgcttgatattgtgccaaacgagctgacaaaggatgagatgaaaaaagggctgacattagaaagcccggaggtccgcagcagactgagccgatcggccatgcaaaagctgctgaagcaaaaaccggcgccgctgacttcggctgccaatctcgactatataacggcggggaatttggaagatgacgcagctcaattgaaggatgctgattggattattgaagtcgtcgtcgaaaatcttgacgtaaaaaaacagattttctcactcgttgatgaataccggaaaccgggaagcatcgtgtcgagcaatacgtccggtatctccgtcacaaaaatggcggaaggccgatctgccgattttaaagctcatttcttaggaacccatttctttaatccggcccgctacttaaagcttctggaaatcattccgattcaggaaacagatcctgacgtgctggagtttatgacttcatttgcagaaaacacgcttgggaaaggggtcgtcatcgcaaaagatacgcctaattttatcgccaaccgcatcggtacgtacggcctgttggtcacggtaagagaaatgctttcttccggctgccgcatcggcgaggtggacacggtgaccgggcctttgatcggcagaccgaaaagcgcgaccttcagaacccttgacgttgtggggcttgatactttcgcccatgtggcaaaaaatgtgtatgataaagccgacggcgctgaaaaagacatgtttaagcttcctgaatttatgaatgacatgctgaaaaacaattggctgggcagcaaatcaggccaaggtttttacaaaaaagaaggtaaaacaatatatgaactcgatccgctgaccatgacatacggtgagcgctcgaaaatgaagacacccgctttagaagccgccaaacaggcaaagggtgccaaaggcaaaatgaaagcgcttatatactctggtgaccgcgccggacgcctgctttggaatattacatcgcaaacactcttatactcagccaggcttttaggtgagatcgctgatgatatcaaagcgattgacgacgccatgaaatggggcttcggatgggagctcggcccgtttgagatgtgggatgccatcggcgtcagaaaatcagcggagcggctcgaagaagaaggcgcagcactccccggctgggtgaaagaaatgcttgatcagggccatgaaacattttatatgaaggaaaacggaacaccattttactattcagacggccaatacagggctgtgaaagaaaatccgaaacggatcagcctgcaaacgttaaaagaaacaaaaggcgttatcagtaaaaacagcggcgcaagtctgattgatctcggcgatgatgtcgcgctgctggaatttcatacgaaaagcaacgcgatcggcttagacattattcagatgattgacaatgcgcttgaggaaacggagcggaattataaaggtcttgtcatcggtaaccaaggcagacatttctgcgcgggggcaaaccttgcgatgattttgatggaagctcaggatgataacttcatggaagtcgattttgtcatccgccgttttcagcagacgatgctgaacatcaaatacagcgctaaacccgttgtcgcggcgccatttgggatgacactcggcggcggcacggaagtctgtctcccggcggcacgcgttcaggcggcgagcgaatcgtatatgggtctcgttgaaaccggcgtcggtcttattccgggcggcggaggaaacaaagagctgtacatgaattatttggacggcggaagtgaactgatggacgcagcgattaaaaccttcgaaacaatcgcgcttgccaaagtgtccggttcggcacacgaagcccgtgatatgcagattttgtccgcggctgaccgtgtcagcatgaatcaggatcacctgctgcacgatgcgaaacagctggctgcttccttatatgacagcggataccgcccgcctgcccgcaaaaaagtgaaagtcaccggggaaaccggatgtgcggcattactgctcggagcagaccaaatgagacggtcgggttatttatccgatcacgatatgaagattgcgaagaagctggcccatgtcattgccggcggaagagtcccgttcggcacggaggtttcagaagaatatttactcgagattgaaagagaagcctttttaagcctcgctggcgaggcgaaatctcaagcgagaatgcagcatatgctcgtcaaaggcaaacctttacggaactaggagggtgtttatgagagaagcagtcattgtggccggtgcgagaaccccggtcggtaaagcgaaaaagggatcgcttgcagccgttcgtcctgatgatttaggcgcgctttgtgtaaaagaaacgctgaaacgggcaggcggatatgaaggaaatatcgatgacttaattatcggatgtgcaacacctgaagccgaacaaggattaaatatggcgcggaatatcggtgcgctggcggggcttcctcatacggtgccggccattacggtgaaccgctactgctcttccgggctccaatccatcgcttacggtgctgaaaaaatcatgatcggcgcgggtgacaccgtcattgcgggcggtgcggaatccatgtcgcaagttccgatgatggggcatgtgacccgcccgaatatcgctttggcggagcatgcgcctgagtattacatgagcatggggcacacagcggagcaggtagccgaaacgtacggcgtatccagagaagaccaggatgcatttgccgtccgcagccatcagaatgccgcaaaagctcttaaagaagggaaattcaatgacgaaatcgtgccggttgaagtatcgctgacagaagtcggtgatgaccataagccgcggaaaaaacaatttaccttttctcaagatgaaggcgttcgtcccggcacatcggctgacgtcttggcgaagctccgtccggctttttctaaaacgggaaccgtgacggccgggaactcttcacaaacaagtgacggcgcggcggctgtcatgctgatggatcgcgaaaaagcttcgtcgctcggattggcgccgcttgtcaaattccgttcctttgccgtaggcggcgttccgcctgaggtaatggggatcggtccgattgaagccatcccgcgggcgctcaagcttgccggactcgaattgcaggatatcgggctttttgaattgaatgaggcctttgcttcacaggccattcaagtcatcagatcgcttgggatagatgaagaaaaggtgaacgtcaacggaggcgccatcgcgctcggacatccgctcggatgcacgggaacgaagctgaccctgtcactcattcatgaaatgaaacggagaaacgagcaattcggcgtggtgacgatgtgcatcggaggcggcatgggagctgccggcgtatttgaactcatttaaaaaaagggggaaacgaacatgaaacaggaaacggtcaacgtcaaaaaaggcggcagctttctgattgaagagacgggatatgatcaaatattcactccggaggactttacagacgaacacaaaatgatcggcaaaacgacagaagactatgtcgtaaacgatgtgcttccttatatcgatgaaattgaaaaccatcagttcgagcattcggtcagactgctgaaaaaagccggagatctcggcctcctcggagcagacgtgcctgaagagtacggcggaatcggcctggataaaatcagttcagccttcattacggaaaagttttcacgtgccggcagcttttcgctgtcttacggcgcccacgtcgggatcggctcattgccgatcgtgttcttcggaacggaagaacagaaaaaaacctatttgccggacttggcttcaggacaaagaatcgcggcatacgccttaactgagcccggttcaggttcagatgccctcggcgcgaaaaccacggctgttttgaatgaagcgggcacacactatattcttaacggagaaaagcaatggattacaaactccgcctttgcagatgtctttgtcgtctacgctaaagtggacggagataagttttctgcatttatcgtagaaaagaactatccgggcgtgtcaacgggaccggaagagaaaaaaatggggattaagggttcatcgacaagaacgctgattttagatcaggcggaagtcccaaaagaaaaccttctcggcgaaatcggaaaaggccatgtcatcgcttttaatatcctgaatatcgggcgctacaagcttgccgtcggcacaatcggcgcttcaaaacgggtgattgagctgtctgccgcttatgcaaaccagcgccggcaatttaaaacgccgatctcaagcttcacgctcactcaggaaaagcttgcgacgatgtcagctcggctttacgcgatggagagctctgtatacagaacagtgggcttattcgaagataatatgagcagactgacggaagcggagcaaaaagacggacgcgaagtcgcgaagtcaatcgccgagtacgcgattgaatgctcgctcaacaaaatgtgcggttctgaaacgcttgattatattgccgacgaaggcgttcaaattcacggcggttacggatttatgcaggaatatgaagtggagcgcgcctatcgcgactcaagaatcaacagaatttttgaaggcacaaatgaaatcaaccgcctgatcgtaacgagcacgttcctgaaaaaagccgtaaaaggtcagctgccgctctttgaaaaagcaaaagcgctccaagaagaactcatgatgctgatgcctgaagagccgggctcggagcctcttggacaggaaaaatacattgtcagacaggcgaaaaagatcgccctcttgacagcgggtctcgcggcgcagaaatacggaaaagagatcgaaggcgagcaggaaatcatggtgaacattgccgatatcgtcagcgcgctgtacgctttggaatcagccgtcctcagaacggaaaaagcgattgcggcggacggtgccgaaaaagccgcgcagaagctgttatatacggaaatctttgcccaggaagcccttcagaacattgaagcgcacgctaaagaatcactgatcgccatggaggaaggagattccctccgcatgatgctttccgtgctgcgcaaactgacgcgcctgacgccgaaaaacctcattcagaaaaaacgtgaagcggcagccgccgtcttccgtgaagaaaaatatacagtctgatcacatgctgaaagcgctccttcatcaggggcgctttttcatgaagcaacgttataggtttttacaagtgattgtgttaaaataacgacgatcatttacaaggggtgaagaagatgtcgttaaatttttactggtaccctaaatgcggaacgtgccgtaatgcgaaaaaatggctggaagaccgcggtaaggaaataaacgaaatacatatcgcggaggaaactccgtcgaaagaagaaattaaagacctctatgaaaagagcggtcttgagctgaaaaagtttttcaacacgagcggaatgaaataccgcgagctgaacttaaaggaaaaactgtaccatatgtcagaggatgaacagctcgaacttctggcatcagacggtatgctcctgaaacgcccgattacgacagacggcgaaaaagtcactgtcggctttaaagaagaccaattcgaaaaatattggatgtaatgccaggttcaaagaattatggtatcttcttattataagaaaaaaatggagggatttagatgagcacaccgaaagatatgcgttattccaaagagcacgaatgggtcaaagttgaggacggaaaagcccgcatcgggattacacatttcgcgcaagccgaacttggcgacatcgtctttgtcgagcttccggaagtcggcgccgaaattaaagcggacgagccattcggcagcgtggaatccgtcaaaaccgtttccgaactgtacgcaccgattaacggaacggtgacggaagtgaacgaagaccttgatgacagtcctgaattcgtaaacgagtctccgtatgaaaaagcgtggatgatcgtcgtggaaccggctgatgctgaagaaatcgaaaacctcatgacttccgagcaatatgacgaaatgacacaagaagactgatcggatagcaaaggggccatttggacattctatctgtaacgggaggtgtctaaaatggcttttgataaacaaaaggtcgatgtgacggagaacgttacgggccgctttcaaaacggccggttttccttgtttcatgaaaatgaagccatcggcgagatgacaggcatggaccagtacgagctcaaacagggcttttcatttgaaaatcaaaaattttataaaacagccgatgtcataaacggcagcgatccgaaatatgtcgattgcgattatgagaatggctggtgttaacagttggcggtgaatttcactgccttctttttcaatctgacgctaaaacaatcggcaggtgacgcgcttatgtacaacggagatgaaaaggtcattatcgtagaaggaaaatctgataaaatcaaagtcagggaagtgctcatcgaacccgcggaaatcgtctgtacaaacggaacgatcggccaaaccgaactggaagatttggcggaccgcctgtttgacagagacgtctatattttaacggacgcagatgactccggagaaaaattaagaaaacagctgaaacgggagcttcccgacgcgcgccatatttatatagacagaacatacaggcaagtcgagtcgtgcccgggccatcatctcgcatctgtgctgatcagagccggctttgatgctgacactgtatttttgaaaaagaacgacctgaggtggtaatcatgaaagaactccaagaaaatgaactcgaatcgattcaggatgacgtttatctcctgtatttgtacaccccgttttgcggcacatgccagctggcgtccaaaatgcttactgtcgtcgaagaaatgctgcccggcgccgccttctataaaaacaacgtgaattattcccccgcattcgccaaagcctatcagattgaaagcgttccgtgctttttgctgtttaaaggcggagagcttgttgagaaaggatacgccttccgctccgtttcctatttatatgagctgattaaacaaaaaacatcgcaaacgttcccgatgtgacaatatttacaggaaaatgtcgtgcggtttataaagggttctgtccgttaaaaagagaaagtgtatgtatggccattaaaacgggaggttatacgagtggagaaaatagaagtttcagagaatgacggacagcatctgtttttgaaaccgctattaaacgcctcaacgcttctgattacattccaaggagaaacagaagccttaacggtctcaattaacggacagggagaaatgagaaaaacgtcggtttcaaaggaaaaatctaatttgaccttttacggaaaccagacggaaatcattcatctcctgcatggtgatgtctctttgcaaaagcttatccaaagcggaaaactcaaagtgaaaggatcattcagagctctgctgaagctggaggccatcctctggctgacaaacggattttttcaggcgatcagtaaacggccgtaactcaatctactatgtgacaatagcttccaatatttattttattgactttttatcattcgccgtgctattctacagtaagaatttccggacgaaaatacgatatgttttctcttatcaagagaggtggagggaagtgccctatgaagcccggcaaccatcaacaatgttgaaatggtgccaattcactcgaagcggtctgctttgaaagatgagagaaaggcctttttcaataagcctttctgctcatttttgcagaaaggcttttcttttgcggagaaacccggaagatttcttagaatagtgtaaggcgggtgattgctttgatccatcttcaaaatgtttcaaaaatttacaaagcgaagcatggggatgtcaatgctgtccaagatgtcactcttgatatcaaaaagggcgaaatatttggaattataggatatagcggagctggtaaaagttccttaatccgtctcctgaacggccttgaaaagccgacgtcgggaaccgtggaagtcgcggggacggaattaaataaagtaagcagccgcgggctgagaaaagcgcgccaggaaatcagcatgatcttccagcattttaaccttctgtggtcgcgcaccgtccgggagaacattatgtttccgctggaaatcgccggcgtgaaaaaaagcgaacgggtccgccgcgctgatgaattgattaaactggtcggattagaggggaaagaaaaatcttatccgtcgcagctgagcggcggtcaaaagcagcgtgtcggcatcgcccgggcgctcgccaataatccgaaagtccttctgtgcgatgaagcgacatcagcgctcgatccgcagacgaccgattcaattttggatcttttatccgatataaatgacagactcggcctgacgatcgtgctcattacccatgaaatgcacgtcatccgaaaaatctgcaacagagtcgcagtcatggaaaacgggaaagtcgttgaagaaggcgaagtactccaagttttcagaaacccgcgcgaaccgatgaccaagcgtttcgttcagcaggtgacagaaccagaggagacgaaagaaaccatccagcattttctgcaggaaacagcgacaggaaaaacgattcagctttcatttgtcgggcaggcagccgagcagcccctcattacggaaatgatccgaaactttgatgtggacgtcaatattctgcaggggaaaatttcacagacgaaggacggagcctacggttctttattcattcatattgacggtcaggaaaaagaagtagaaaacgtgatccggttcatcaaagacaaacaggtagaagcagaggtgatcacaaatgtttgaaaaatggttcccgaacgttgatataaccgagctgtggacggccacatacgagaccctttatatgacggtcatcgctttagttttttcatttatcatcggagcggttctcggtcttctgctctttttaacgggcaagggaagcttatgggaaaataaaatcattaacaccgtgattgcggcggtcgttaatattttcaggtctattccgtttcttattttaattattctgcttctcggctttactaagattttggtcggatcgattttaggaccgaacgccgcattgccggcgctgattatcggctccgcgccgttttacgcccgtcttgcggaaattgcgctccgggaagtcgataaaggagtcatcgaagctgccagatcaatgggagcaaagacatcgacgattatcttcaaagtgctgattcctgaatcaatgcctgcgttaatttcaggcatcaccgttacggccatcgccctgatcggatctaccgccattgccggcgccatcggttcaggcggactaggaaaccttgcatatgtagaaggctaccagtccaataatacggatgtaacgtttgtagcgacagtatttatactcatcatcgtctttatcattcagattatcggtgatgtaattacaaatataatagacaaaagataagggaggatttacattgaaaaagattgtattaagtgcgctgctgcttgtgttcgcgggagttttggccgcctgcggatcaaacggctcgaataaaaaggaaatcgtcgtcgccgcgacaaaaacaccgcatgctgaaatcttaaaagaagcggaaccgctcttgaaggaaaaaggctacacattaaaagtaaaagtgctgaacgattacaaaatgtacaacaaagcgttagctgataatgaagtggatgcgaactacttccagcacgttccttaccttgaacaggaaatgaaggaaaataaagattacaaactcgtgaatgccggagccgttcaccttgagccattcggaatttacacgaaaaaatacaaatcactgaaagacctgcctaaaggcgcgaccatcatcatgactaacaatgtcgctgaacaaggccgtatgctggcgatgcttgaaaaagccggactgatcacacttgatccgaaggtgaaaacgattgaagcgactacgaaaaacattacgaaaaacccgaaaaacctgacattcaaaaaaatcgcccctgaattaacggcgaaagcatataatgaagaagaaggcgatgcagtcttcattaacgtcaactatgcgattcaaaacaaactgaatccgttaaaagacgcgattgaagtggaatcaacgaaaaacaacccgtacgcaaacatcatcgccgtacgcaaaggtgacgaaaaatcagagaaaatcaaagcgcttatggaagtgcttcactctaagaaaatcaaagacttcattgagaaaaaatacgacggagccgtgcttcccgtatctgaataaagcgaaaaccccggatgagtcatccggggtttttttcgggtattaatcggagaactgtccataataaaagggaaggttaacttattggagggaatggcagtggctcaataccaggataacggcaaaagcgtgcatgacgcgttaaaacaatacaaagaaggtttaggcatatttgaacaaaaaatgccgatgatggggcggaagtttaatgaatttactgaacagtgtttctcagcggattcattaactgaaaaagagaaacaattaatcgctctgggtatcagcatcagcgctcaagatgaattttgcatgatttatcatacgaagggctgccttgaccaaggggccacagaagaaaacatccttgaggtcatcagcgtcgcggcggcattcgggggcggcgcggctctcagtcagggagtgaccctcgtgcagcagtgcattcaggaattcggacatacgacgcattagaatgagcaatcgtgtgaataccgtttttcagataaagtgagcgccggtttccggcacattcgaaaggattcaggggcacactctctttggccggagcaggggatcattgttacaatagaaacaaatatatgaagggattgattcattatctgcaccagccacgagagactggaccttgactatacgcctgaaatggaaaaagcgatgcagaagtcacacggcatcggctacgaggaatacggacggcgtctttcaaaaaggatggaagtcgaacggcagagggagcttgaatatcaaaaaagcaagttcctcgcagcgcagcttaatgagaaaatcggtcagtaaaaaagggtggatttccgccctttttctgtttcaaacagctttaattacgccttgatctttgataaactttaggaatgttccgggtaatataaaaagttgtatttacttttcatttgttataaaattagaatgagaataaattgagaataatgattatatattttggaggtatagatatggctgcttcaacattaacgatcaaggatcttcacgttgaaatcgaaggaaaagagatcttaaaaggtgtaaaccttgaaataaaaggcggcgaattccacgctgtcatggggccgaacggtaccggtaaatccacgctttcagcagcgattatgggacacccgaaatacgaagttacaaaaggcagcatcacgcttgacggcaaggatgtactggaaatggaagtggacgagcgcgctcaggcgggtcttttcctggcgatgcagtacccaagcgaaatcagcggtgtgacaaatgccgatttccttcgctctgcgattaacgcacgccgtgaagaaggcgatgaaatttctcttatgaaattcatccgcaaaatggacgaaaacatggagttccttgaaatggaccctgaaatggcgcagcgttacctgaacgaaggtttctcaggcggggagaaaaaacgcaacgaaatccttcagcttatgatgatcgagccgaaaatcgccattcttgacgagatcgattcaggtcttgatatcgatgcgcttaaagtcgtttctaaaggaatcaacaaaatgcgcagcgaaaacttcggctgcttaatgatcactcactaccagcgccttctgaactacatcacgcctgatgtcgttcacgttatgatgcagggacgcgtagtgaaatccggcggcgcggagcttgcacagcgccttgaagcggaaggttatgactggattaaacaagaactaggcattgaagacgaaactgtaggccaagaagcgtaagcgttagggggataatcatgacattggaaacgaaactatccgtagatcaggaatatgtcaaaggcttttccgaaaagcatcaagaacctgcctggctgaaaaacctgcgcttacaggctcttgaaaaagctgacgatctgccgctgcctaagcctgataaaacaaaaatcacaaattggaactttacaaagttcaacaagcatacagtagaaaatgcgccgcttgcttctttagaagatttagctgatgaagcaaaagcgctgatcgatatcgaaaacgaagacaaaacgttatacgtgcagcgtgaccaaacgcccgctttcctttctctttccaaagaactgaaagacaaaggcgtcatctttacggacatcttaacggctgcccgtgagcacagcgacctcgttgagaagtatttcatgaaagacggcgttaaggtcgacgaacataaactgactgcgcttcatgcagcattaatgaacggcggggcattcctttatgttcctaaaaacgttcaggtggagacgcctgttcaggccgtttacgttcatgaaagcaatgacacggcattgttcaaccacgtgctgatcgtcgctgaagaccacagctccgtcacttacgttgagaactacatcagcacggtgaatccgaaagaagctgtattcaacattatcagtgaagtggtcacaggtgataatgccagcgtgacgtacggtgccgttgacaacctgtcagcaggcgtcacaacatacgttaaccgccgcggagccgcgcgcggacgcgacagcagaatcgagtgggcgctcggactgatgaacgacggcgacacgatttctgaaaacacgacaaacctctacggagacggcacatacggcgatacgaaaaccgtagttgtcggaagaggagaacagacggaaaactttacgacgcagatcatccacttcggtaaggcttctgaaggctatatcctgaagcacggagtcatgaaagatgccgcatcttccatctttaacggaatcggcaaaatcgagcacggcgcgtctaaagcaaacgctgaacaggaatcccgcgttctgatgctgagtgaaaaagcacgcggagatgcaaacccgattcttttaattgatgaagacgatgtaactgcaggacatgcggcatctgtcggccgtgtggacccgatccagctttactacttaatgagccgcggaattccgaaagaagaagcggagcgcttagtcatttacggattccttgctccggtggtaaaagagcttccgattgaaggagttaagaaacagctcgtctccgtcatcgaaaggaaagtaaaataatgaatatcaccgatattcgtgaacagttcccgatccttcatcagcaagtgaacggacatgacctcgtgtaccttgacagcgcggcgacttcccagaagccgcgtgctgtcattgaagcagtggatcagtattacagcaaatacaattccaatgtccacagaggcgttcatactcttggcacgagagcgacagacggctatgaaggtgcgcgtgaaaaagtccgtaagtttatcaatgcgaaatcaatggctgaggtcattttcacaaaaggcacgacaacttcactgaatatggtggcgctgagctatgcccgcgccagcttaaaacccggtgatgaagtggtcatcacccaaatggagcatcatgcgaatatcattccgtggcagcaggctgtaaaagcaaccggcgcgactttaaagtatatcccgatgcaggaagacggcacgctttcgttagacgacgtccggcagactgtcacaagccatacgaagatcgtggcagtcgctcatgtgtcaaacgtgctcggcacgatcaacccgattaaagagatcgccaaaatcgctcatgacaatggcgcggtcatcgtggtggacggggcgcaaagcacaccgcacatgaaaatcgacgttcaggacttggattgcgacttcttcgcgctttcttcccataaaatgtgcggcccgacgggaatcggcgtgctgtacggcaagaaagaactgcttgagaatatggagccggccgaatttggcggcgaaatgatcgactttgtagggctttatgaatcaacttggaaagagcttccgtggaaatttgaagcaggcacgccgattatcgcaggcgcgatcggattgggagctgcgattgattttcttgaagagatcggactcgacgagatttcccggcatgagcataagcttgcagcctatgcgcttgaccgtttcgagcagctagacggcgtgacggtatacggtccgaaagagcgggcgggacttgtgacatttaatcttgatgaggttcaccctcatgatgtcgcgactgtcctcgatgctgagggcattgcggtcagagccggccatcattgcgcccagccgctcatgaaatggctggatgtatctgctactgcgagagcgagtttttatctgtataatacagaggaagagatcgataagctcgcggaagccctccaaaagacaaaggagtactttacaaatgtcttttaatgcaaatttagatacattatacagacaagtgatcatggatcattacaaaaatccgcgcaacaaaggggttttggatgacagcatcgtcgtcgatatgaacaacccgacttgcggcgaccggatcagactgacaatgaagcttgacggcgataccgttcaggaagcgaagtttgaaggggaaggatgttctatctccatggcttcggcttccatgatgacgcaggcgattaaaggaaaagatattgataccgccctttccatgtctaaggttttctcagacatgatgcaagggaaagagtatgacgactcgatagatctcggggatattgaagctcttcaaggcgtttcgaaattcccggcccggattaaatgtgccaccctttcatggaaagcacttgaaaaaggagtcgctggcgaaaaaggcggcaattaaaagattggagtgaaaatggatggctaaaaaaatgcctgaaattggtgaatacaagtacggttttcacgataaggacgtttccattttccgttcagagcgcggattgacaaaagaaatcgtagaagaaatttcacgcatgaaagaagagcctcaatggatgcttgatttccgcctgaaatctcttgagcatttctacaacatgccgatgccgcagtggggcggggatttaaactctttaaactttgacgaaattacgtattacgtaaaaccgtctgagcgttcagagcgttcttgggatgaagtgcctgaggaaattaaacagacattcgacaaactcggtattcctgaagctgagcaaaaataccttgccggtgtttctgcacagtacgaatccgaagttgtttaccacaatatgaaagaagatcttgaagagcaaggcatcgtcttcaaagacacagacagcgcgctgaaagaaaatgaagacattttccgcgagcactgggcgaaagtcattccgccgactgataacaagtttgcggcgctgaactcagctgtttggtccggcggatctttcatctacgtgcctaaaggcgtgaaggttgaaacaccgcttcaagcttacttccgcatcaactctgaaaatatgggtcagttcgaacgtacgctgatcatcgttgacgaagaagcaagcgttcattacgtagagggctgtacggctcctgtgtacacaacaaactcgcttcacagcgcggttgttgaaatcatcgtcaaaaaaggcggctactgccgttatacaacaattcaaaactgggcgaacaacgtttacaacctagtaacgaaacgtacggtttgtgaagaaaacgcgacgatggaatgggttgacggaaatatcggttctaaattgacgatgaaatatccggctgtcattctgaaaggtgaaggcgcgcgcggcatgacgctttctatcgctcttgcgggtaaaggacagcatcaggacgcaggcgcgaaaatgattcaccttgcaccgaatacgtcatccacaatcgtatcaaaatcgatttccaaacagggcggaaaagtaacataccgcggtatcgtccacttcggacgaaaagcggacggcgcccgttcaaacatcgagtgtgatacgctcattatggataacaaatcaacttctgatacaatcccttacaatgaaatcctgaacgacaacatttcattggagcacgaagcgaaagtatcaaaagtttctgaagaacagcttttctacttgatgagccgcggtatttctgaagaagaagcaacagaaatgatcgttatgggcttcatcgagccgttcacaaaagaacttccgatggaatacgcagttgaaatgaaccgtttgatcaagttcgaaatggaaggctccatcggttaatagtaaaaccccgccatttggcggggttttttgtttattggatagtgaaattaccgtattcgcttgaccggacatgaatcggcccgtttaaattgtagttcttctctttgacaatatcgcggaaaacgtcgacacgggcaaccgattctctccattcatcctgagtatcctcatctgacggattcatcagatcgtcatagcgcacatccaagaatttattgagccatttcttctcgtcaattccatctttcggtgacccgcccatttttttgttcgtgcgtttaatcagggcataaaaggagtctggatcatcgccgtcgccatgctgaatcaccgtatcgtacatcactgcttttgccaaggccgttttcagtccggcattttctgaacgtttcatcgccggctgataatacaagctgtcatttaccttatcctgggcagcgcggaaggctttatcattgccaagtgagcgccaggcagaagcgaatcctttcagattgctgatgtcatcgctttcgtccttcgcaagacgccgcaattcaggcaaatactttttcaatttgttattcggcaccgctttcgtgtatacttcgactacttccagcgcatctccggtagccgtcgtaaagccggcccgcccgcaagtgtaacctcttccgtcatccaacgcttcaatatatccgtattggatttccgtctttccgttttcaaagatgctggtcagctgttccgcccggcgcttctgatccttattcagcccggccgcaaaaaccgtaccgctcatcatcagggtaaaaaacatggtgaaaataagtgacgaaaccgccgtcttcttccaaaaacctgcttttttcttcaagctgattttcattgccatacccctttcatatgtaagttacgcactcagtatacatgagggggttgtttttttgttgaaaacacacgaatttgtcaatattttgaatcctaagccctatcaggcgcttcataaaaaggacgcaccttcatcagacagacaatcccgttctcgcgtcattctcatctgtaacatagtcaacgcggagaaatccgcattgtacagcctgctgataaagggcttcgagcatatccggatctttgcaatataacgttacatacgagcaatctgcaatgagaagcacaagctcacaggaactctccaaatactcctcgtacgtattgatttccgttaccatcccgcccgggaaagctttcaattcagcaaaaatcatataataagggtttccttccagacgctgacggagttcttgaccctgaatgatgcgctgattttgcggaaacaggtctgtatcgatgccttctttgaattccgtatacgcctctccatcaccgataaaccacgtataggaagagatggggaacggttgtaatatatctgccgcaaaccgcccgaattgatttgggatgttaaatgtaatgccgcgtttcatatggtcgtatctcctttcggcttttgctagaataatatggtataccatttggataaatattgaaaggggtgggtgttatgacaacacgatacggaattgatgcgccttatggagcgtttggatttatctttattgcgctcctttatgccgcaggcacgttatacggcatgattcctccttactggggctggctgacgggcaccttgtttttattgctcggtctttggatgctcttgtattcaacggccattaaacttttacaccgccatcgcattcttgcgctatccggtttaaagccggacatgaaggtgcttgatgtcggtacggggcgggggctattagccatcgccgcggctcaaaaaggcgctgacgtctcagcgattgacaaatggtcaagctgggacctggtcggaaacggaagagacgcatttgaaaagaacagacaggctgaaagagcgccggaaattgatttgtatgacggactggcgcaagacatgccgtttcctgatgagacgtttgatcttgtcatttcgcattttgtcgtacacaacatttcaggcagaaaaaagagggaacgggcgattgcggaaatggtgagggtgctgaagcctggcggcattttggccgtgtcagatataaaaaatacatcacaatacagagagatttcttgaggaaaacggctttcagacaagaacgtattccttttattatacgtttccgttttcgaaactctgtcaggactccagtaggaaccgggcgctccatttgttaaaataaataagacaaaacagatagaaaaggtgttacacatgaagtcttatataattatcggagccggcattctcggtgcgtccgcggcttatcatctcgcaaaggccggtgcggatgtaacggtcattgatcggaaacacccggggcaggcgactgacgccgcggcggggatcgtctgcccgtggctgtcgcagcgccgcaatcaggcatggtatgcgatcgcaaaaggcggagcccgctattataaccaattgatacagcagcttgaagcggacggagaaacagaaaccggttatcaaaaggtcggagccgtcagcctccatacggatgaaaaaaagctcagccaaatggaggaaagagcttataaaagaagagaggacgcccctgaaatcggtgacattacaagactgactccggaagaaacgaaggcgctgttccccgcgctgtcggaggaatatggggcggttcatgtcagcggcgcggcccgggtgaacgggagggcgcttcgtaaggcgctgttaaacgcggccgttaagcacggcgcggcggtttacaatgaagaagcgtcaatattgacagaggacggtgccgtcatcggtgtgaaaaccgcagaacgcacgcttactgccgatcaggttctcgtaacggccggcgcttgggcgggagagctgcttgagccgctcggcatccgcttttcagtatcatttcaaaaggcgcagatcgttcatttagagcttcagggagaggatacgggcggctggcccgtcgtcatgcctccaaacgatcaatacattctcgcctttgacagcggcagaatcatagcgggcgcgactcatgaaaacgataccggcatggatttgcgggtgacggccggcggtctccgcgagatttttgacaaagcattaaccgtggcgccggggctttcagacagtactgtaatagagacaagagtcggtttcaggccgtttactcccggttttcttcccgtcatcggcaaagtgccgaatatcagcggactcctcgttgccaacgggctgggcgcctcaggactgacgagcgggccgtatctgggggctgaactggcgaaactcgcgctcgggcagcagacggaaattgatttgagcctttatgatccggccggggcgcttgaataaaaaatagcttttggcgcattcttatgataggatggagctttaatgaataagaggacgtgacccatttgataaaaataaaccttcctgctcctgatgtaaccattacggaacggcagcagtcaccgtcggagaatgaaccggcgattaaagcgatttacggtttcattgattttcaccaaattccgagagacaaaggcggcatctttatgttttataacattcatgatgagctgctgtttgtcgggaaagcccgtaaattaagacaaagaatcaaaaagcattttgaagacaatgtgtcgcctgttaaacatcacagggacgaagtgtataaaattgaagtatgtgtcgtaaatgatccgatggaaagggagatttacgaaacgtacgcgatcaatacccttcagtcgaaatacaacattgagaaagtattttataaataagaaaaaccggagcttaagggctccggttttctttatgtttacagtgccagccacatcacggcaatatgcacgatcagcagacagtaaacgacgaggaatagctggacgaccttttttctgaataacatgcagatcatcatgagcacgggaaaaatcaggacgccggccgttttattgattgatgtattcggacggttcgacacgtcatagtgaatggccatatcagcaggaagaaacggataaaacacaatcgacagaataaaggcgagaactacagctccccacagcactttatcattcatcaaaaacatatgaacactcccttttttacatataatagtatattagtccgaaaaatctaatttatcaatattttacctgttgattggtgtataatcatgtcaatgaaatttccatacgctaggagggtttcaattgactgacaagaagcaaaccagcatgttttcattctttctttttatcatggccgcctggatcatcgttttgttttttaccgtcatcgcggcactgccaagctccgccatccaattaaccaagcatcaatccaaaaccgtttccatgatttatccgcaaagctggggatttttcagtaaagatccgagagaagacagcttgaatatctatcttcttgatgccgatgaggagctcagatggccgaataattctctgaaaaatgtcatcggcttaaaccgctacggccggacgcaagggatagagctcggccttatgctggaaaagctgccttccaaagagaagtggaacgacttcacgactggccaagacattaaggataccacatttttgaaaatgaaaaatgagtctccctccccaaggctgaaagggaaaatgatcattacatatgaacgcattaccccatgggcatggagccagcataccgaaacgaaaagaaccatccaaaaatacatcggagtggatgtcaattgattcaggatgcaaaaaagcagctcaccttatggatgatgaagaatccgccttggacaaatgtgtacgggcttgccagaagcttaatcgcgctcggcacgctgctgacattgctgttcaatccggcgtctgtcttcttcaaaacgcaaaatcaaatgctcagcttttccgacacgttcagcctgtttctgctgtttcccgatttccgttacattgagatcgtcaaagccgtttgtatctgtatgttaatccttgtcgtcattggctggcggccccgcctcaccggtttttttcactggtggatttcgtacagcttccaaaactccgccgttactcttgacgggggagatcaagtggctgccgtttttacgttgctgctgctcccgctgacattaaccgatccgcggaaatggcactggtctccgtacgaggcgtcttttgagaaaaggccgcttgagccttattaccgctccttgtgctgggcgacgctgacaatcatcagaatacaggtcgcaatgctgtattttaactccgtcattgccaaactgatggaagaagagtggcagaacggaactgccgtttattactatttgaacgatccgatgctgggtctgccggatgcgcttcacggtctgtttgactttatcctgcagtccaagcttgtcatcatcccgacttggggcacgcttattgtgcaaaccattatgttctgcgctttgttcgctccgaaaacatattggcgtctgatattgtttatctccatttttatgcacgaaatctttgccgttatgctggggcttacctcgttttccattacggtggctggtattttggtcctgtttttggtgccggcagagaaaacagtagctttgaaccattacaatcccctttttatcagatacaattttttcaataaaaggaaaaggaggaaattatttggttaaaagcaagaagtccgcagctgccatgatgctggtgtttgttttaatggtcgcattagtcggcccgcatgccgcggcgaaaactgagccgtcggtctcttattcgggtgaagacattttttccggcatctttttcggacaaggtgaggtcgcaaagctccttcctgaagtatgggataccaaggctgtcaaaaagattgatcaggatgaattaaagcaagtttccgatcaggtgatcgctgatattaaaaagtcatcgccggattattttaaagagttgaaagcggcggtctacagcggcgattatgagaaagtgaacagcgtcattgatcaaggttcgcagattatggcgaaagtgctgaaagaagagtttgacaaaaagagcatggacaaaggaaaatcaacggccatcggccaatgcgcaacggctgtatgggtatttttaaacgcggcggccgccattgagacgatcgctcttgcggtagcggccatcattttgacagtagcaagcgttgacgaagattccgacttaggaaaagagcagctcatcgctaatgtcgttgaccgcattaacgcgcagcactgaggctgaagaaagaaaacgctaaggaaacgaaccttagcgtttttttgattgaagcatctgttttaaatatgcttctgaatcaaagccgagttcctcgtcggcttcttttttcagttcaagctgaagtcgcacgtacgtgtcatatttcgggctgagcttttgaagaagattgctgaaaggcgatcccgccttcagcgcgggcagatcagaagcggattctccgaccttgatcaggctttccctgtattcttcatctgtctgcactcttttcacaagctgaatgatgatgtttttatgagtgtcccaagtggcggggtctctctccaaaatccgctcgataaattggtcatgctgtactttgtgctgctggagctgagccggatcctccttgccgaccagctgcatcatcgggtgtgcagccggaacttcttccatatcatccaatactttaataagctccgcccatatcgtttttttctcatctgtatcaatagaaaagtcgaggaacggttcaaacagcgcggcgataaattctccgaaatctcccgggaacagttttttcagctgaagtcccatatacttcggttcatctattttgacctcgccgatatcatgcagaattgaatcgacattttccgcatcttccacgcgcttgatcagcatttcagtcagtttccgttcctgctcaagctcttcaatctgccggctgagcttttgatgctgccggcgcagtatatcatgcagactgctgccctctaagaggaacgctttaatatcgcttacagacagtgccagcattcggagggcggcaatcattttcagcgtattcacgttctgagcggaatactcacggtatccgttatcagggtttttgctgacggtgattaaaccttcctgctcataatatttgatggcttttttcgtgagacccgtctgcctggcggcttcttttatattcattctgaatcactccctgtttttcattctaaacgtgtctctaagggtcaggtcaagagagggcgggaaataagacgggtttattttatattttagaaatttcagaaaatatgattgacaacgcacctttgttgcgattaatataacgttatataatgttatataacgttatataataaaacactgaggagtgaaggatttgagtcaaactgccgcacaagtgaatcacaaagttcaggctttcttggatgatctgaaaggaaaaacgattgaccacgtctttttcgtcgcttgcgggggttcttcagccattatgtatccgagcaagtacgtgtttgacagagaggcgaaagccatcagctctgatctctacagttcaaatgaatttattcagcgcaatcccgttcagctcggagagaactctctcgtgattttatgttctcagtcaggcaatacgccggaaacggtgaaagccgccggtttcgccagaaaaaaaggcgcgcttacgattgcgatgacctttgagcctgattcgccgctagcgaaagaagccgaatatgtcgcggtgtatgactggggtgagaatgcacaggcgataaatacgaattacggggttctgtatcaaatcgtgttcggcgctttacacgtgctggaaaaccatcccgcgtttgagtcggcgatcgacggactcaataagctccagaccgtatatgacaaagcgcttaaacaagaagcggatcacgcaaaggcattcgcgaaagcccacgaaaaagaagatatcatttacacgatggcaagcggtgcgaactacggcgtcgcttactcctacagcatctgcattctcatggaaatgcaatggattcattcccacgccattcatgccggagaatattttcacggaccgttcgaaatcattgatgaatccgttccatttattatcctgctcggcttagacgaaacaagaccccttgaagagcgggcgctttccttctcaaaaagatacggcaaaaaactgactgtgcttgatgcggcagcatatgatttttccggaattgacgattctgtaaaaggctatctggctcctctcgtattaaaccgggtgctcagaagctatgcggatgcgctggcggaagcaaggaaccatccgttaagccagcggcgttacatgtggaaagtcgaatattaagaacgcgcattatatttcaccggactataatgatatataacgttatagtccggtgacaaaggaggaaaagcatctgaaaaagctcatctgcctgttcgttctgttagccgtatgtctgtcagccgccgcctgttcaagccaaagcagttcctctgacggaaaagtgactctgaagttttttcacaggtggccgaaggagccggaaaaaagctattttgaagaagcggtcaaagaatttgaagccgctcatccggatattcatatccaaacggaagcggtcttaaacgattcttataaagacaaggtgaaagtcatgctcggaacaacgagcccccctgatattttcttttcatggagcgaccggtttgcttataaattcatcaaaggagataaagccctcgatctgtcgtcttactatcagcaggataaagattggtcctcacagcttgtgcagtcacaaatcaaaccttttacgcatgacggaaaacagtacggtgttccgtggcaaatggacgctaaatcattcttttataataaggacatttttaattcattacatttgaagcccccggcgacatgggatgaactgatcacagtctctgagaaattgaaagagaacggatatattccgatcagtttcggcacaaaagcgccttggaccatttctcattatatcgggacgctgaaccagcgtatggtggatgaaaaaacgcgggcgaaggattacagcccggaaaccggggagtttacggacgaaggctatgtcaaagcgcttgaaaagcttcaggaacttctgccgtactttacaaagcacgtgaactccgttgatcacgaatacgtgcgccagcagtttacgagcggcaaagcggcgatgatttatgcggaaacggcagaaattaagctcgtcgaaccggtcaatctgggcttgtttcctttcccgaaaatcagcggcgaaaagggatctccccgtgcactgaccggatctccggaaggatttatgatttcctcaaaaacgaagcacccgaaagaagccatggaatttcttcagtttttaacctcgaaaaaaatgggagagaagctgataaaagacgtcggtaaatacagcgcggttcagggaacggcgacagaaaacaattccaccccgatccagcgtgaagccgtgcaggatatcgtccgcgccgaaacaatggtgccgtggtttgatatggatgttgacgttgaaatcgccgatgtgtatgcggcaggcgttcagcagatgctcggcggcacaatgacaccgcgcgaggtgatgaattccgtgcagaaagcggcgcgtcaagtcaaagcgtcatctgaatagaacagatttctttggagaaaggagatgaggatttccttggtcagccgaaaacgtttcattccgtatctgtttctcgcgcccgcgctgatttttctgctgttcgtttacattccgattattgagaatgtgtttttcagtctgtttgaatggagctcatttcaacccgaaaagacgtttatcggtttgaaaaattatattgacctgtttcacgatcccgtattttttacagcgctccgcaacaatgtgctgtatgcggtcatatcgctgatttgccaggttggcggcggcttaattctggcggccgtgctggaagacagattggtaagaaaatggtcgccgtttttccgcacggtcttttttcttccggtcgtcatttccatgaccgtcattgcgctgttgtttgattttatttataacccggaaatcgggcttttgaatcagctgctggaagccgtcggacttgatgaactgacccgggcgtggctgggcgatgaaaacaccgctatgctgtctgtcatttttgtgtctcaatggcagtctgtcggttacatcgccatgctgtacattgtctcgattcagagcattcctgctgaattatatgaatcggcgcagctggacggagccggaaaaatccagcagttttttcacattacggtgccgcagacgaaagaaatgtcgtttgttgctgtggtgatgacgctgaccggcgcatttaccgtatttaatgaaccgtatattctgaccggcggaggtccgggcaatgcttcagaagtgctgagcacatttttgtataagagcgcttttacaaaggatatgatgggctacgcttctgcgatcgcgacggtggtgcttttgctgacgcttgctctgtcgcttattcagatgaaattctttaagaccggaaaggaggagtagccgatgcttcctgaaaagacggacttgcgtcatgcccgtcaggccgtcagaacaggcggaaaaccgagaaaatggtatgtcggggaaacgtctgtgtggctgtttctctttatctacctcattgccgttgcttatccgctgttatggatggcggtcagcgcctttaaaagctcggatgagatttttgagcacagctggtcgctgccctctgtctggcatcccgaaaacttcgtatccgcatggaaccaagggatttccgcttattttatgaacagtgtcattgtgaccgtgctgacttgtctcatcaccgtatttgtgagcgcctgggcggcatacgggctggcccgttttcaatttaaaggaaaagggtttgtgctgatcatttgtcttggcggcttgatgctgacgccgcaggtcagtcttgtgccgctgtactccattatccagtcattgggactgtacaatacgtattgggcattgattcttccgtacgccgcctaccgtattccgtttaccgtgattctgatccgttcctattttttgtcgatctccaaagagcttgaggaagctgcctatctggatggatgtacaagtttcggaatatttttcagaatattcttacctatgagcgtgccgattctggtgacatcaggcattttgacggcttaccatacatggaatgagtttatgtttgcgattatttttatcgatgatgaaaatttacggacgattccggccgggctgatgcagttcagagatgcgctgcagacggattggggcgtgctgctggccgggctgacgatttctgctgctccgatcatcgcgctgtttctattgatgcagagatattttatccgcggcattgctgcgggaagcgtgaaaggataaggaggatgaaaagatgaaactgatagcggccggagataatgtagtagattattatcaggatcaggagacgttttacccgggcggaaatgcgttaaacgtagccgtgcttgcccggcgcttaggccacgaaacttcttatatcgggattctcggcagtgatgaagcggcggatcacgtattgaatgtgctgaaactggaaaaggtgaatgccgatctgatccgccgggcatacggagaaaacgggatggcggtcgtcacgcttgatgaaagaggggacaggatatttgccggatcaaataaaggcggcgtgcaatcgcgtctgacgctcgcttttcaggagaatgacatctcatttatcgccggacatgatctgctgcatacgagcgtatacagcaggatagaacgtgacctcccgatgctgagcggccatgtgccgatttcctttgacttctctgtaaaacgtgacgaagcctatttagaagcggtctgtccgtacgtgacgtatgcgtttttttccgggagtgatttgagtgaaagtgaatgtatgcggcttgccgaaaaagcccgcggtttcggagcgaaaatcgtctgtctgacaaggggggaatatggcgcggtgttatcggatggggaacgcgtctatcatcagccggtggtaagagctgatataatagatacattgggcgcgggtgattcttttatcgccgggtttcttaccgatttcttcgagcatcaggatattcggcgagcgcttactgcggccgccgggacggctgccaaaacatgcggagggttcggagcgttcggttacgggcatccctacaggccgggcggcgggaaaagcagtgaaaaaacgagaatacgataagcattgtctcgttttttatacttgttacgcatagggactgttaatggtaaacgtaacgcggtcggtatgcattaaaaacagcgagctgtatatcggcttgtcttttgacataaatgcggttttgtcaatttcaaaaagcgcatccccgatatcacaagccagatagcggctttcttcctgcttggcgtatacgacatttaacagcttcgtattatgggtgggcaccacctgatagtgctgtttcaaaatgtcatgcatcgacacgccgcctttaatatgcttgccgatgtcgggaaataaactgagcggatagtgggcgatttcgaatgagagcggctggtcgtcgtgaaataaaatgcgttttaattcaagaacgggactttcggaagcgacgcgaagtttttgggcgatggatttaggcgcttcaatggtttcatgggaaaggatctggtgtttcggttttttccccgttgattccataaattctgagtagccgttgaccgcgatgagctcccgcttcagtttagggcttttaacgaacgttccctttccctgctgccggacgagccagccttcttccacaagatcaaggatggccttcctgaccgttatgcggctgacgttgtacgtttcgcacagctcattttcggtcggcagttttacggacggcgaataaacgcccttcttgatatcgtccgcgataatttgtttcagctgaatatataaaggtttcgagctcccgttatttaacaatgggacggacctcctttgtcaagtagtagtactattatatgtattatgacgttataatacaaatttgcttttcatttatgaatctgtcagaaaccccgaacatttttaacataacagaaagatgtggcggtttccagtattggaggaggtttcgaatggcatcattaacatttgaccatatcaaaaaaacatacggcgcccaatcggcggcagtgaaggattttcacttagatgtaaaagatgaggagctgctggtgctagtcggtccctccggctgcggcaaatctacgacactcagaatgattgccggactggagagcatttctgaagggaagctttatatcgatggagacgcggtgaacgatctgcccccgaaggatcgcgatatcgcgatggtttttcagaattacgcgctgtatccccacatgacggtgtttgataatatggcgttcggtttgaagctcagaaagctgccgaaaaaagaaatcgcagagcgagtccggacggccgctgatattttggaaatcgggcatctgctcaagcggaaaccgaaggctctttcaggcggacagcggcagcgggttgcgctcggccggtcgatcgtgcgggagccgaaagtgtttctgatggacgagccgctttccaacttagatgcgaaattgcgagtgacgatgcgcgccgaaatcagcaagctccatcagcgtttgaaagcgaccatcgtttatgtgacgcatgatcagacggaagcgatgacaatgggcgaccggattgtcgtgatgaatgaaggagatattcagcaggccgcaagcccccatgagatttatcattatccggcgaatctgtttgtggcgggttttatgggttctccgagtatgaattttataaaaggcgcccttgaagaaagtcacgggcaatggtattttgccggttcgtccgttcgtctgcccattccgaaagaaaaagcggccgttcttgtgcagaaaggatacagcggtaaggagatgattgcggggctgcgtccggagcatttgacgcttgccggacaatcagagcacccgcctgaagcggtgtgccgcgctgtggcggaagtatgtgaaaacttaggcgcggagatgtacgttcatgcggtgaacggagatgaccgcatgacgatccgtcttgacggcgcttcacaggtgaaacccggcgatgccattctgcttgcggtcaatatgaaccgggccgtcttttttgatgccgacactgaaaacgccgtatattgaaaaagggagcctgatgatcggggctcccttatcacttcttatgatacgattaccagatttcgtccgcccattccggatggtcgataaacggattgcggttatgctgatagtcttcgtaaatgatttcgttccgccgtttttccttactgtcgacggggtcttgttgattccatttgagcaaaacggacagttttcccatgtaaggagctgagccgtttccggttttatcattcagctcaaggtcgggatacccgtcttctccttcataacgcaccgccatgtaaaacagcatgcgggcgacgtctcctttaacctcatcgcgcggctcccaggaatcgccgtcgtaataattgcccggcgctttcgggtattctgagccgccgttatcaaaatccatatttcctctggcactgttcacctgaacgtctgcagggcgcagatgatgaatgtccgtcccggggccggcagctgttccgaagtttccgtgtgactttgcccacacgtgttcgcggttccagtccccggcgctgccgccgtttttacttttggcccgtgattcctgggtgtagagcaagatgacattgttcgggtttgccggatcttcgtcagtttccttcaatgcattccatacttggctgtaagacagctttgtatgtccgctgatgatgcggtgcagggcgctctttaaggccgttccgctttttccggaagcttctttgtaatatgtgtccgtatccgcagacggagtgatgacagctgaggcagtttgcggaaaaagagttgtgtcgccggcagttgaaaccgccatccggctgtacagattcgtgtcagccggcgcgcccgcagaggctgacggcgcggcccatccaaaaatgaaaaacaggcagacaatcggcagaaaccaaagtttttttgtcatgacttgccctcctttacctctattatctgaaaaataaatctactattctatcttttttgaaaaatggttccttcggcttattggtcaaagtatccggaaaatcattgattttttggaagataagataatgaactcgttatgcgctccttctataatgaagatcatcttgtcagtttttcagtttaaaaggagggcgtgtatggaacatcagcagctttcggcggcgaatatcgggatttccgatgacatacaatggctgtctcaattcggcgcttccgcttccggcggagtgacgaggcttttatatacgaaagaatggatggacgcccagcttgccgtcaaaaagaaaatggaggcgttcgggctggaaacggcatttgacgatgtcggaaacgtgttcggccggctgaacggcacagaatcgcctgatgaggtgattctgaccgggtcgcatattgacaccgttattgacggcggcaaatatgacggtgcgttcggcgtgctggcgggcatgctggcgatccgtcatttgcatgagacgtgcgggcgtccgaaaaaaacgctggaggctgtgtcgctctgtgaagaggaagggagccgttttcccatcacctattggggctccggcaatatcaccggtgctttcacgctttcaaatgcggaaacgccgaaagacgcgtctggcatttctctgaaagaagccatgcggcagaacggcttcggtgcaggccgttatccagcaccgctgcgcaccgatattagtgcctttctggaaattcatattgaacaggggcaaacgcttgaacgatcgggaaaggatatcgggattgtcaccgggattgccggacagagacgctataccgttacgcttgacggtgaatgcaaccatgccggcaccacttcaatgaaatggcggaaagacccgctcgcggcgggaagcagcatcatccacgaactgatgctttcagcggaaagacagccggaagagctccgtctgacgtgcgggaaaatgacggttgaaccgaatatggcgaatgtcattccgggccgtatccagttttccgttgatattcgccaccggcaggaagacgtgctggcagccttccatcagaaactggcgtcgattgttgaaaacatcagccgcagcaaaggagtcaggcccattattgatgaatatatgaggatagagccggttcaaatgaatcagacactgacgcgtaccgcagcggaggctgcaaaagaactgggggcggacccggagaaaatcgtaagcggagcgggacatgacgcccagatgctcggcagaacctttccggcctgcatgctgtttgtaccgagccgtggcgggatcagccactcgccgcttgaattcacacccgtacatcagcttgaaaccggcgtccttacgctggcgaatgtattacataaacttgcctattaacgtaaagggggaatcggcgtgccgaccagaaaagaattgtgcattccgcaaagaacgattatgacaccgggaccgacagaagctgaaccgagagtgctgagggcgatgggcgctccgatcatcggccagtttgacccggcatttaccggcatcatgaacgaaacgatgcaaatgctccgtgaattgtttcaaacggaaaaccgctgggcctatccgattgacggtacatcaagagcggggattgaggctgttctcgcaagtgtgatagagccgggcgacagcgtgctcgttccgatatacggacgcttcggatacctgctgactgaaatcgccgagcggtacggagcggacgttcatacgatcgagtgtgaatggggaacggtcttccggcctgaagagattatcagcgagatgaaaaagatttccccgaaaatcgtcgctatggtgcacggagaaacatcaacggggcggattcacccgctgaaagaaatcggggaagcgtgccgcgcccaagacgcactctttatcgtggatgccgtggccacgattggcggatgcgccgtaaaaacggatgaatggaagattgacgcagtcatcgggggaacgcaaaaatgcctatcggtcccttccggaatggcgccgattacttataatgaccggacggcagctgtcattgccgcgcgtaaaaaggtagaacggggcattgcgacggcagctgacggcaaaaggctgtccggtcatcggccggttatgagcaactattttgatctgagccagctcgaagattattggagtgaaagaaggctgaatcaccatacagaagcgacagcaatgctttatgcgctgcgggagggtgtgcgccttgtcctggaagaaggacttgaagaacggttccgcaggcatcggcgtcatgaaaaagcgcttacggcgggacttgcagcgatgggccttgatttattcggcgatccggaggcgaagctgcctgtcgtcacatgcgtgaagattccgccggaagcagacggcgaatcgatcagaaggatgcttttgtctcaattcggaattgaaatcgccagctcgttcggtccgctgcaggggaaaatttggcgaatcggaacgatgggctacagctgcagaaaggaaaatgtgctgtttgtgctggctggacttgaagcggttctgatcagacacggagtttcagttaaagccggggaagcgctgcaggcgacccttaacatatatgatctgccggctgaaaccgttgtgcggtcatgagacatgaaaacgagattgaaatcatctggacttttttcccttttccccgttatactgaatggtataaaaaatgacaaatatggaatgatcatctgtttgtctggggagaaggtaagaaatcatggcgtacatgggccgattgtcaattttaatgctgaatatgtttattgcgatgcttggaatcggattgattattccgattatgcccgcatatattaccgaattcggagcgacggggagcacgatgggtctgcttgttgcatcggcggggcttacacagcttttatttgcgcctattgccggggaaataaccgacaaatacggacggcggaaactgattattttcggcattgccgcctttgccgtgtcacaattgatcttcgcttttgcaggaagcctgtggcaattgttcgcatcccgccttttgggcggaatgggcgcggcgtttttaatgccgtcaatgttcgcttacattgcggatattacgaccgaggaagaacgcgggaaaggaatggggctgttcagcgcggcgatgacgctcggtgtcgtcatcggacccggtgtcggaggctatttggttcattacggcatgtctgtgccgttcatcgtgtccgcaagtctcgcctgcttttcaacggtgctttcatttttctttctgcccgaaacgctgggacgtgaaaagcagctggaagcccgggcaaaaacggaaaaacgtgagcatctgtttaagcaaatgtcacgcgcgctcaaatcgccgttcgcgtttatgctgattctggtttttgtgctgaacttcggaattatgaactttgaatccgttttcggcctttacgttgaccataaacacggatttaaagcgtctgatattgcctttattattacggctgcgggtctcatcggcgtgtttgtgcaggcggtcggcgtcagttatctcgtccgcaggttcggggaaaaacgcgtcattaacgtgacgttgatcggggctgctgcaggacttgtgtggtgccggtttgcgggttcatattgggccgtttttgccgcggcaatctttttcctgacgctgacatcgctgctccggccggcggttaatacgatgctgtcgaagctcgccggtgaccagcaggggtttgccggagggatgaacacctcattcatcagcttagcgaatatcgccggaccgtcagccgccggttttctctttgatgtaaatatggaatttccgtatatgctgggagcggccattctcgccatcagttttctggccgcgcttggctggggcaaaaagacacagacccggccgttcacgcagcaaggatagaatcaaaagcctccgggtatccggaggctttttgctgattgccgtttattctttggctctgcatctctgaaattgcagagatgcgcatagaaggaaaatcatatcgaacgccattgtgaattatagggaaatcagttgttccatatgctcaagcgcgaatggaaaccggaacaggtgtagataaaggaaaaccagctttatcgcttgacgagtctgacgaatttgatgccggaagttgatcaaaaaagaaggcagtcaggcggggacatcattgagcggaaaatgctgagaaggaaaaagcagtggtttggaacttgctgtttcgtatgcagagggagagcattctgataaaacgggtcattgaaataatacgaactgttcagatggggtctattggtgtattacggagtggcggtcttataaaacctctctcgggtgattttgtgatggttcccctgcacgaattttgcaggctaaaacccgcaattaggccaacacacaattatgcaagagacaatcatctaaaaagggtgtcggtaagtacaatatggtgtacggaaaaggagttgaaaatgttgtattattacccgtcattccatttgtatcagcggcaagaatttaattcttatccatgggcccatcaattgacccattcagggagctccacctatgtttccgcgcgccctcctttttataattctccatgttacagagagtgcataagaagcggagcggatagttatttctgctgctatatctgcggtttttgttaaaaagaaagacttatagaagtaagtgatctttccaagatgacagtgagaccattatccagacagccattagccaacatacgaagcttcattacgattcacggaggggaagcgcccctccttttttggaaattttataaaatccccttgcacggcccgtcagaagtggtatttggtcttgatgtgttcgactgttggtattgacaaagaattcaagataccaggaagcagcgaaacttgtatgtatcagcgagacacaaagttttccgccgctgagcgggttagttctcactgcgttctatctcctgtagtagataacgagattttggggctgtctgctgaagaaaaagaagagattcgcagtgaagtcttagcaaacatggaataaaatagtataatatcctcattacttttacgaaatgagggaagttatggattggttggagttttggtcatcagtaataaaatctattgcctggcctattattgttttgatagcagtgttttttttgagaaagcccgttactcaattaattgaaaaaatagctgaatggaagctagctacacttaaatatggagattttgaagcaacatttagtcaaggtcttcaaaaagtcgagtcagagttagatgagtctgatactagcggcagttctgagcctgacgattctcaaacaaataaagagccttctttaattcagatactaatatcaatatgatagctagagaagctccttacttagcagttgtcctatcttgggttttggttgagcatgaactagacgctgctatggcaagagtaggttttgatagtgatacacttaaggggaaatttgtaactgcaaaattaaaaatgaggtaccttattgaaaataaatatttagacaagagttattatgatgcttttagtgacctgttacgtttaaaaaacgtagcttcacacgaatataaagaagctaaaaacattagttactatgattctatgaaatataacaaattaacaaaaaaaataatcaaagggctcaaagatatagctcctttttaaagatcttctatcatgaaggtctttttattttgaaatgagtgaacacatgccaagagaactgataaatgcaaaaatcacacatgtttcttacgtagacaaggctgctaatcaaaagcagttttttttatgaaatcagaaaaagaaaagcagcatgactttcagggcggcgttggtgaagtggttgagtcttatgtcgctccccgctgatttttaaatgaatggcgaaaccatcaaaaaaggatcatgggtgcttgtgacaaaggtaccgaggcaatttgggaggaaattaaaaagagtgagattatcggttgtatcctgaatatcgaaaaagcctgatgatatcaacggaagcagatgttgatggcagcattttttgagaatttagctgaatgaattccccttaaataggatgcgggagaacaccccgcatccctgtctctaacgatttcttaaccgatcagccgctgcattctcagcgcgagccgcaggcgcatcgtcgtctccggatcttttaagcttttgccgagcagttcctcgcatttttctaaacgatagatcaccgtatttcgatggacgtacaggcgcttagccgtttctgaaatctggcagtgggtctccagataaacagacagcgtatgaagcaggctctggtcctccttttgccggtcggccaggctttggagggtggcttcgtaaaatttcttcacatcttccgccggaagcaggcggagaagctccggcacgtctttggcatgatagatttgaataaactccgcgcttctggacaaatgcccggatgaaatggcgtctgaagcttcagtaaaagcgtcagggacgtcgatcagcttttggcatatgtttgagatgccgaaggagacagtccgtttaaattgcgtccggacctgcttttgaaactgctccaaaaagctgatgacagacgcgtgcatttcattccagctgtctgtcgcttcaattaaaagaataccgacatttcctttaataaagagatgagggggaaacgggaaggatgacagctccccttcaagcagatcaaatacatgatcggaaacgagctgattttcggtaaagctgatcgttttctcatttcggtcaagctttccgcaaatgcacatgtatttctgatcccagcggagccggaattctttggcgcggcttttgatttcttcatggccggtaaacgagcggtcgatgaaattgctgaaaaattcattgcgcgcccgtctgctgaattgtttgacggcattttctttcagcagttcaaaggaaatgacgttagccgcctgttcaatagtcaaaatcatgcctttatcagcggtctgcaccagctccggtatcaccagataaccgcagtttttttcaacattcagaatcggcaggacagaatacgcctttctgtcggacagcatggaaaagcaggtgaaataaggcccggaaagggaataacagatgtttttcaataaagacgtgtcaatgggtatgcggtgggacgatgataagagttttgtatgctgatccaaaagcagcacgggaagccggagaatgtctgagagcttcttaagcagggattgcagccccttgccgctcatgatgtggtttgtgaattttttatgggcgtaaatggcctgctggagctcatttgaacgcatatcaagaatatggctcagtgtggcgttgacgatatctcccagcctgatgtcttccggcagctcaataatcggaaattcataccggtcggcaagctccgcggcatctttcggaatgacattaagataacgcttcgttttgatccccagtcccgcgcagccccgttttgccatgaggcggatcaaatctttcaacagttgcgggcggtccttcaagtggtaagccgtggtgacgagcaattcgtttttatgtaaaaaatcagcgatgtccggcgcatccatcatgttgacgtgctgcacctccctccagccgccggatttgcctgcgattaatgcagcccgctcataagcgggaatcttcatcacgtcataaatgttcatcagtcagtctcctttcaggttctaaagacaaccattggttaatatgaataaaaatcatcaaaaattatagcggttttgctgatgtattacgatcatagtagcagtaaactggcaatcatagacgcatgttgtgataaaaactgacagaaaatcgtcatccttacagggaggaagataaaatggcctatgacgtaattgtaaagggtgcgaaagctgtacgaaaaggcggaacagagcgggctgatatcgccgtcaaggacgggaaaatcgccttgatcggacccggcattgacgaaaacgcggaacaagtggtgcaggcggacggcatgtatgtgtttccgggcgcggtcgattgtcacgtccatttcaatgaacccggccgagaagaatgggaaggcattgaaaccggctcaaacatgctggctgccggcggctgtacggcttattttgatatgccgcttaactgcatcccttcgacggtaactgctgaaaacctgctggcaaaggcggaaatcgccgaacggaagtcagcggttgattttgcgctttggggcggtttgatgcccggatataccgaacatatccggccgatggcagaagcgggggcaatcgggtttaaagcgtttctgtctaaatcgggaacggatgaatttcaatcagccgatgaacggactcttttaaagggaatgaaggaaatcgcggcgtgcggcaagattttggccctgcacgcagaaagcgacgccctcacccgattccttgaagccgagtacgcgctccaagggaaaattgatgcccgcgcttacgcttcctcccgtccggaagaggccgaatgcgaggctgtgcagcgggcgattgaatatgcaagagcgacgggatgcgcgcttcattttgtacatatcagcacgaaacgggccgtgctctccattcagcaggcgaaaaaagacggattggatgtcaccgttgaaacgtgtccgcactacttattattcagctttgaagacttcctcaaaaaaggggcggccgccaaatgcgctccgccgctccgctcagaggctgataaagaggaaatgatcgggggtttggctgagggcctgattgatatggtgtcttcggatcattctccctgtcatccgtctttgaaacgcgaggataatatgtttctgtcgtggggcgggatcagcggaggccaatttacgcttctcggcatgattcaattagcgatcgatcatgggattccgtttgaacatgtggcccgatggacggccgaagcaccggccaagcgcttcgggttaacgaataaaggtcggcttgaagaaggatttgacgctgattttgccatcgtccggccggaaccttttaccgtcacaaaagaaacgatgttttccaaacataagcaaagcctgtatgaaggccacacctttccataccgaattgctgcaacctacagtaagggacgctgtgtgtatcaggatggcggtcgtaagcagagcggggctttcggaacattcctgaagccttctcaaataaaagagccgattctctgatgagaatcggctttttttgtcgtttggaaagcgggtctcgtggtatctttttataaaaaggagtaaaacacattgtatgatcaaatcttgaacatattaacggcatcctggtcgcgcaagactagtacaaaatggacggaagattgcccggccaaaggccagtgcggcgtaacggctttagtcatccaagatgtttacggcggtgacattctcaaaacaaaaaccggcacaagctggcatttttataaccgaatagacggggagatatatgatttcacgagcggtcagttttcagagccgatcgtctatcagcacattctttcttccagagatgaggcattttcggacaccaatgaacatcagtaccggttcctgaaaagtgcattcagaaaaaacatggaaaaagaaagagaaaaacacctgtgataaactagagtgagaggtgaaggattgtgatttatatcggactgacggggtggggggatcatgacagcatctatccgcctaaaacagcgggcccgcaaaaactgcaggcgtattcctcccattttcccatcgttgagctggacgcgagcttttacgcgatacagcccgcccgcaataatgaaagatgggtcaaagagacgccggaatcttttcaatttgtcattaaggcatatcaaggaatgacgggtcatcagcgcggcgatattccctttgaatcgaaggaagaaatgtttgaggcgtttaagctgtcattatcgccgtatatagagcatggaaagcttgccatggtgctgttccaattcccgccgtggtttgactgcaagaaagaaaacgtcgcatatttaagatggtgcaggcagcagatgggcgatatcccgtgcgcgcttgaattccgcaaccggtcttggttttctccgccattttacgaacagacgctttcctttatgaaggaggaaggctggattcacagcatatgtgacgagccgcaaatcggcgagggcagcattccgaccgtcctgaaagcaacggatgaagaaaaaacgcttgtccgttttcacgggcggaacaaacagggctggatcaaacctgacggcggacaaaattggcgtgaggtcagatatttataccgctataacaaacaggagctcaaagattggaaaaacaatcttcaggagctgaaaaaacagtcgcgcaatctgtatgtgctcttcaataataactcaggcggagacgccgccgataacgggcttgagatgcttgaaatgttaaatatctcatataccggacttgctccgaagcagctcgacctattcagctagaaaagaggtttcaagacacatgtcttatcttattttgattatattgggatttatcgcgggaacggtcggcagcctgatcgggcttgggggaggaattatcatcgtgccggcaatgctctatttaagcacgatgactccgtttttccatgacgtaacaccgcagactgccatcggcacgtcccttttggtgattatttttacgggcctgtcatcaactctggcctatatgaaatataaaaccgttgactacaaaagcggactgatcttttttatcggttccggcccgggaagcatcatcggcgcgtatttgtctaaactttttaatgcgcatacgttttccgtctggttcggactttttatgattttgatttccattacattaatgctgaaggcgaaagcaaaaccggtcaataaagcgcataaaggcatgatccggacatatgaggatgaatcgggtgagctttatacatattcgtaccgtatttttaccggtatcgtgattgcctttttcgtcggtttattgggcggtcttttcggcattggcggcggctctcttatggttccggccatgatgctgttatttttgttcccgccgaaagtggctgtggcgacgtcaatgctcattattttcttatcctccgtgacgggttccgtgtcacatatcgcagagggccatgtcaattggctgtatgcgctgtgcctcgttccgggcgcgtggttcggcggcaaaatgggcgcgtgggttaataagcgggtgcagacgaaaacgatcgtgcttttcatgcgggtcgtcttgattttgatcggctgtgaattgatttatcaagggatattcagctaaaaggtaggagagatggtatgttagagaagctccgtttatatcatacgaatgatttgcacagccatttcgaaaattggccgaaaatcgtacattatattgagcagaagagaaatgaacatgaaaaagacggggaggaaacactcgtattcgacatcggcgatcatatggaccgattccaaatgataacggaagcgaccttcggcaaagcgaatgtcgacttgttaaaccggcttgagatcgatgcggctgccgtcgggaataatgaaggaattacgctgcctcacgatgagctggcggatttatatacccatgccgcgtttcccgtcattgtgtccaacctgtttgacgcggatggacagcggccggaatgggccgagccctacgtgatcaaaacactgaaaaacgggatgaccgccggcatactcggcgtcacggtgccgtattatcccgtctatcaaaaactcggctggacggtgacggatgcggaaaaaagcattcaagaatcacttgacgatatcaagggcaaagcggacatcatcattctgctttctcatttaggcctgatcgatgaccgggccgcagcggaaaaatttccggacatcgatgtcattcttgaatcacatacgcaccaccttcttgaggacggacaggacataaacggcgtattgcttgcatgtgcggagaaatacgggaactatgtcggctgtgtcgagctgacgatagaaagtgaatcacgaaccattgtcagcaaacaggcgtctgtacagaaaatggctgattggcaaggggaatctgaagatacggcggcttttctgaaagagaaggaacgggaagcggaaaacctgctctccgaacaagtcgccaacctgaatgaagaagccggcgtgaagtggtttgaggaatcgccgctcccgcttctattagccgaagcgctgaaaagctggtgcggctgtgaagtcagcatggtgaattcaggcgtcattttggggcctttacagaaggggcctgtcacaaaacttgacctgcaccgcatctgccctcatccgatcaatccggtcgccgtgcgtctttcaggcagggaactccaggaaacaatcagccaggccgcctcggaacaaatggagcagctgcggataaaaggcctcggcttccgcggggaagtgatgggcaggatggtatatgccggagcggaggcagaggccggcatccttgaagacggtgtgacgcatctcctcaatgtgaaagtgaacggagaagagattgatccggagcggatatactcggttgccgttctcgatatgtttacactcggaaagctgttcccttacatccgcgattcaaaagaaaagcaatactttatgccggagtttttaagggatctgctcgcctggaagctcgcgcggcagccgtaatgtcatgtagctgcccgccgttccatttcacccgaatgagtgaaagcgggactttttaagagtgaaaataaaatactatgtcccctcttacaagcatacattgtgatatgtaaggggggatttttcttgcctagataccggagcgctcttcgcaagagagggcctttgccttttcgatatgtgcttcttctgtcgtttgctttttttatcatatcgacggtcatcagcctttggatgatcaactcctcaatcaaaccggtgctgatgaacataggagaaatggaaaccaaacgggtggcgacagaggtcattacggaatccattgaagaatacatgtctcacagcgacaatgtgaaagatatggtcgatatgaaaacggatgaaaacggaaaagtcacaacgatggattttaatacacaaatggtcaacagtatgaaggcgaaagtgacaaagcagcttcaggctcatctgaaggaagcggagtcgaacaataagcagcatgaaacggaaaaaggcgcgaaaacggccgatgaaattatgatcgatattcccttagggcaggtcacgggaaacagcattctcggaaatctggggccgaaaatccccgtgcgctttaacctgatcggtgatgcgttaactgatgtgaaaacaaaaataaagccgtacggcattaacaatgccctgatcgatatcagtatttttgtggaaataaaagtgaaggtcattattccgtttgccagtaagacatcagtcgtgacaaataatattccggtctccattaaagcgattcaaggagaggtgccgcagttttataacggaagcggcgggtcaggtgtgacgccttccgtccagctgccgagtgaaaaacagaagaaagataaataaaaacacacagccgcaatctttcctggcggctgtgtgtttactttttcctgcggatttcttttcgttcccatgcccttaaatggggatacggatcaaaagaccattccgatctgccgttatctttatacatcccgtagtgaagatgcggcggaaattttcccgcggtgcccggcggtccgtacccggaactgccgacagagccgatcacctctccgggtttgacgatctggcctttatgcacaccttttgcaaagccgttcaggtgagcgaagtagtgatacgtgttattgatatccctgatgccgattctccagccgccgaaacggttccagcccttcatttcaacaataccgtagcaggtcgatctgacggggagcccgtaatgagcgaacagatccgttccttcgtgaatccggcgcccgccgaaaccccgtgcggcgccccatgtgctgcggtagctgtaatccgtcttcacgggaagcggaaaagcgtgctctccgagatcaaggcggccgaacgttttaaacagtgtcatgaattcggtgataatgccgaccgtctgatcacggcggtaataattccagagaccgatgcggatatggtcaagatcggttccgaatcccgctaaatactgagcaaatgtataaaggatatcctcatcattgcttacctcggcttttccgtcgccgtcgccgtccaggccgatcccgtcaaatactttaatgctgagaggcgcatcgtccttaggatttggattttcagggccgctccacaaatgatccggaatataaatgctgatgattcccgctttttccggcagatcctttcggttcgagcggacattttcttcatattgatcaactgccgcaagcacataccaaggaatctgcgtgactgcttcggctttgcggtacaactgcatccgttcgccgtaaacaagagccgattgttctttcccgcttgcagccggacagaaaactgaaaaaaggagaagagcagataacagaactttcacaacatgatctcctttcaggattgaatacaaatagtttgcggcaacaatccgagaaaatgtaagtaattctcttcccttgtcgagaaatttttcctatgttaaagtgactattgaatagaaatccgcaagttttatatccatcgtgaaatagaaatttttcgcacacgaacatgaataaagggttaatggagatgatggggaaatggcaaagaaagacgagcatctgagaaagccggaatggctcaaaataaagctgaacacgaatgaaaactatacgggtctgaaaaaattaatgcgtgaaaataatctgcataccgtatgtgaagaagcaaaatgcccgaacatccatgaatgctgggctgtcagacgtacggcgacgttcatgattctcggttccgtctgtacgagagcatgccgcttctgcgctgtaaaaacgggactgccgactgagctggatctgcaggaaccggaacgcgtagctgattccgtcgcgctgatgaatttaaaacacgccgtcatcacggccgtagcgcgtgatgatcagaaagacggcggagcaggcgtctttgcggaaacggtccgggcgatccgcagaaaaagtccgttcacgacaattgaagtgctgccatccgatatgggcggaaattacgacaacctgaaaacattaatggatacccgtcctgatattctgaaccacaacattgaaaccgtccgccgcctgacaccgagagtccgggcccgcgcaacatatgaccgttctttggaattcttgcgccgtgcgaaagaaatgcagcctgacatcccgacgaaatcaagcattatgatcggtctcggcgaaacgaaggaagaaattattgaagtgatggacgacctgcttgcgaacaatgtcgacatcatggcgatcggccaatacctgcagccgtcgaaaaaacatttaaaagtccaaaaatattatcatccggacgaatttgccgaactgaaagaaatcgcgatgcaaaaaggcttcagccactgtgaagcaggcccgcttgtccgttcttcctaccatgcggatgaacaagtgaacgaagcgtctaaaaaacgccaggcccaagcataagataagccgaaaaaacccaaaacgccgcaggttttgggttttttgtgatggagccgtttttgcagggaaaaagtcattcttgaataaggatcgtctgaaccgctacactggatataaagaggaaaaattctccgtccgtccgaaccgtctcattttgcaattgatggacagaagtcaatgaattatgatagtaaagagtgataaaagaggtgaagacatgattcttattcaaaatgccgagtttgaactcgtacacgattttaaaaacggctttaatgaagaagcgttcaaagcccgctattcggacatattaaataaatatgattacattgtgggagactggggatacagtcagctgcggctcaaaggcttctttgatgaccagaatcaaaaagcaacctttgaaacgaaaatcagcacattggacgaatacatttacgaatactgcaatttcggctgcgcgtattttgttttaaaacgaatcagaaaataattgatgcagaaggggatgctgtcacgtgtattttgttgacagaaataatatcgaacaaacactccgtttttttgagacccagctggcgctgtttgacagcacgcctgcatgggagagcgagatcgaaaaaagggcgcttgagcggatcagccatcttatgatcgaatgcattctcgatgtcggaaatgatatgattgacggctttatcatgcgcgatccggggagttatgacgacatcatggatattctgacggatgaaaaggtggtagctgaggatgaagggaataagctgaagcaactgatctcttccagaaagcagcttgtccaggaatatcagcacgccgatcatcaggagctgtttacgctgatcacgtcaaacagagatgtgctgaaagcctttccggcccgtgtaagaacctacctggaaacagaattagggcctgtttccgcatttaaataacaacgagtgagaaaatccacaggagtgttgagtatgaaggattataaaggatatttgatagatttggacggcacaatgtacaacgggacggaaaaaatcgaagaagcgtgtgaattcgtgagaacgcttaaagcgcgcggcattccgtatttattcgtgacgaacaattcttcccggacgccgaagcaggtggcggacaagctgatgagctttgacattccggcatctgaagagcaggtcttcacgacgagcatggcgactgcgcagcatatcgcccaggagaaaaaagacgcgtcggtgtatgtgatcggcgaagaaggcatccgtcaggccattgaagaaaacgggctgagcttcggtgaagaaaacgcggactttgtcgttgtgggaatcgaccgcggcattacatatgaaaagttggcaacgggatgccttgcgatcagaaacggcgcccggttcatttcaacaaacggcgacgtcgccattccgactgaaagagggcttttaccagggaacggttcgctcacatccgttttgacggtgtcaacgggcgttgagcctgtctttatcggcaagcctgaatccattattatggaacaggcgatgcgtgtgctcggaacggatatttccgaaacactcatggtcggcgataactatgcaacggatattatggccggcatcaatgcgggcatggatacgctgctggttcataccggagtgacaaagcgtgagcatatggcagattacggccaaaagccgacatatgcgattgactctttaaccgaatggattgaacatctataaaaaagggacggccatgacggccgtccttattctgtatttctggcgctgtgagcaagccggcttgaagccgctgctgcgattgcgccgacgatatcatcaagaaacgtatggcattcgcccgtagatttatcatttaaccgcccgagaataccgggtttttctttgtcaatgtagccgtaattcgtaaagccgattgagccgtatatattcacgatagagaaggcgagcacctcgtcaaccccatacaggctttcatcaatcgccagaatggtctgaagcggttcagacagctttttttgttcggcgagcacatctaattctattcccgttaaaatggcgttttgcacctcgcgttttgcgatgacacggtccacattgagcctgcatacctccatcgtcaaatcaggatgatattttttttgaaggaaatacaccagctcggcaatatcgtccgtctcaaccccccgttcttttaaacgcgccctggcgacagcttccacctgattcagttgttccttttctgacatttgcttcacccaatctttttttactagtttatacaacactcttccgatgtgtacgatgtttctccacttgattcaaaggattacaatatgtattcataattccgccggcgtatgactacgatgtgaatagctctaatttttcaggcaggtgattatgatgaaaagcatcattaaagaaaaatacggcatccacgtcagacagctctccgtttatcagaaataccaatgcttccagacgcctaattccttctttcttataattcccgtttccgggttttcgcaatcagagctgacggagctttactacatgagtcagtatttacaagaacaaagtgacccatacgtttcagtgtttatctttacgaaggaaggagaactgacctttgaggacgaaggcaaaacgtatgcgctcttaaaagcgccgattcccgtctcaaaccggtcgttttctgtcggaggggagcttgccgaatttcacagaaaagggcggggttttccgtacgaagtgaaagaagcgggcaggatcggccaatggaaggacttatggggaaaacgggtggatcagctggaatcattctggatgcagaaaattcatatgtctccgcttgaaccgttcgaaaagaaaatgatcgaagcatttccttattattcaggcttagcggaaaacgccattcaatatttagtggatacggagctggatgacaatcccggcgcagaagactcggggacaatctgccatcagcggatggaacgggatacctggtcggaggaatcattgatccgcattccgggcgattgggtattcgaccatgccgcccgtgatattgcggaatatatgcgcagcacatatttgtatcatcgtgacgacctgctcaaagatgggtttttgtttctgcaggaatatgagcaagttacgccgttatcctccttttccaaacgcctgttttacagccgcctgctgtttccgctccatttcttcgagacggtggagagctattacatttctcatgattctgaaaaacagttttacgaagagcagcttgactacattcttgccgactgcacccgctatgaacagtttttacagacatgtcacaacatgatgaatgtcaggtcggcgcaggtttttgtcccgcctgtggcgtggctcggaaaaggaatcagttcgtaagaaaatatgacgtaaaaatatttagaaaatagggaatcttgtcatatcagtgtgttaagcgttttcatagccgtagaaacaatattcagccgcttgtcaaaacaaatgcgggcttatataatatttgtaacttaaatgtctgtgaagggttaacaattgtccttttctagtggacaaaaggaagaaaggtggagtttctctttggaagcgattcgtattggactgttaggactgggaaccgtgggaagcggagtcgtcaaaattatacaagatcatcaggataagcttatgcaccaggtcggctgtccggtgacaatcaaaaaagtgctagttaaagatattgataaaaaacgagacgcagacctgccgaaagaagtgctgacgacagaagtctatgatgtgatcgatgaccctgaggtcgacgtgattattgaagtcatcggcggtgtcgaacagacgaagcaatatcttcttgatgccttgaaagcgaaaaaacatgttgtgaccgcaaataaagatctgatcgccgtatacgggtcagagcttttagccgccgcaaaggaaaatggctgtgacttgtattatgaagcgagtgtcgccggcggaatcccgattttacgcacgctcgaagaaggcctttcctctgaccggatcacaaaaatgatgggaatcgtcaacggaacgacgaacttcatcttaacgaaaatgattaaagaaaaaagcccgtatgaagaagtgctgaaggaagcgcaggatctcggattcgcggaagcggacccgaccgccgatgtagaaggcctcgatgccgcacgcaagatggcgattttagcccgtctcggcttctctatgaacgtcgatctggacgatgtcaaagtaaaaggaatttcccggattacggatgaagacatcagcttcagcaaacggctcggctatacgatgaagctgatcggcatcgcccagcgtgatgacaataaaatcgaagtcagcgttcagccgacactgctgccggatcatcatccgctctctgcggtgcataacgagtttaatgccgtttacgtgtacggagaagctgtcggcgaaacgatgttttacggccccggagccggaagcatgccgactgcgacatcggtcgtttccgatctggtcgcggtcatgaaaaacatgcgtctcggcgtaaacggaaacagctttgtcgccccgcagtttgaaagaaatctgaagcagccgtctgatatctatgcccagcagtttttaagaattcacgtcaaagaccaggtcggctctttttcaaaaatcacatcggccttctcagagcgcggcgtcagctttgaaaaaattctgcagctgccgatcaaaggccatgacgacctcgcggaaatcgtcatcgtcacgcatcatacatcggaagaagatttcagtgacattctgcaaaacttaaatgacctcgaagtcgtacaagaagtaaaaagcacatatcgcgtagaagggaacggttggagctaatgtggaaaggactcatccatcaatataaagaatttctgccggtgacggatcagacgccggccctgacattgcatgaaggcaacacgccgctgattcacctgccgaaactttccgaaaagctcggaattgaactgcatgtgaaaacagagggcgttaatccgacgggatcctttaaagaccgcggcatggtcatggcggtcgccaaagcgaaagaagaaggcaatgataccatcatgtgcgcctctacagggaacacatccgcggcagctgcggcatacgcggcgagagccggcatgaaatgcatcgtcatcatcccggacggaaaaatcgccttcggaaaacttgcgcaggccgtcatgtacggtgcggaaatcatcgcgattgacggaaactttgacgacgcgctggccatcgtccggtcgatttgcgaaaaatcaccgattgcattagtgaattcagtaaacccttaccggattgaagggcaaaaaacagcggcctttgaagtatgcgaacagctcggcggagcgccggacattctggcgatcccggtaggaaacgccgggaatatcacggcctactggaaagggttcaaagaataccatgagaaaaacggcaccggacttccgaagatgcgcggttttgaggcggaaggttctgcggctatcgttcgcggcgaagtcattaaaaatccagagaccgttgcgacggcaatccgaatcgggaatcctgccagctgggacaaagcggtgctcgctgcggaagaatcagccggaaaaattgatgaagtcacagatgaagaaattcttcacgcttatcagctgattgcccgtgaagaaggcgtgtttgctgaaccgggctcctgtgcatccatcgccggcgttttgaaacaggtgaaatccggtgaaattccaaaaggcagcaaggttgtcgcagttttgaccggaaacggcctgaaagatccgaacacggctgtagacgtatctgacataaaaccgattacgctgccgacagatgaggacagtattctggaatacttaaatggagcggcgcgtgtatgaatgaggcggagatgctgttttccattacggttccgggaagcaccgccaacttagggcctgggtttgattccgtcgggatggcgctcagcagatatttgaagctttcggttttccgaaacgatgaatggcagttctcggcggaaaccgaaactgtcgcgggcatccctcaaggaacggacaacctcatctaccaagtcgccaaacggacggctgaccgctatcagaaagagctgccgcccgcccatgtcaaagtgtggagtgacatcccccttgcacggggtctcggaagcagcgcggccgctatcgtcgccgccattgagcttgcggatgagttatgcggcctgcagctgtcggaaagcgacaagctgcacttagccagtcttgaagagggacaccctgataatgccgctgcttctcttgcaggagggcttgtgatcggccttcacgaagaagatgaaacacatatcgtgcgtgttgccgaagcggatatcgacgttgtggcagtgattccgttttacgaagttctgaccagggacgcaagagacgtgctcccgaaagagctgccgtaccgacgcgccgttaaagcaagcgccgtcagcaaccttctcgttgctgcgatcatgtcaaatgactgggcgctcgccgggaaaatgatgagaaaagacatcctccatcagccgtaccgcgccatgcttgttcctgagctttcaaaggtggaacatgcggccgaaatgaaaggcgcctacgggacggcgctgagcggagcgggaccgacgattcttgtcctgattgaaaaaggaaagggagaagagctgagaaagcagctttctgagcatttcccccactgtgagattgcggcgcttaccgtcccgtcagaaggaagcgtaattgaacggaatcctttagagcaggtgaaaagtgtataatgataaaaaagcgttcttcccatcagagaaggacgctttctttttctggagaaggatttttatttagggaagcgaaataaaaaagaaaaggaggagatacgattgaaaaaactcataaccgaggaggacattgcgactctcgtatccgtgacagacccgcaatatgcccctgacggcagaagagccgcttacgtccggacaacagtcaatcataagcgtgattcctattcctcagccattatggtatatgacacagaatccggcatctcaaacccatggactttcggggacaacagaaatacaagtccgcggtggtcacctgacggacagcgcctcgcctttgtttctgacagggagaacggcgtccctcagctgtacatcatcgacgctgccggcggagaggcaaagcaggcggccgatattccttggggcgtatcagatccgatatgggcgcccgacggcagatccgtgcttgtgtccgtcagtctgacatcagcggagcgcgccgatgagaaagaaaaaaagaagcatgacgagtatgagccggttgatattcagtcattaacatataaacgtgacgggaaaggcctgctgaacggaagctgggcccagcttgtgctgattcatcttgaaacgggggagattcagcagctgaccgatcatgaagcggatcattatggcgcggccttttcaccggatggcaggcagcttgcgtttaccgccaatttatgcgagccgggtgacgccggaaagccgagcgatgtctatctgatgaatctggcggacggaagcctgaagcagattacgccgcaccgcggttctttcggtttctgcgtgttttcaccagacggttcttatatcgcgatgctgggccatgaaaatgaatttcgcaatgcgactttagagaaagcgtggctgtacgacgtgaaaactgagcggctctcctgcctgaccgacatgctggatgttcatttgagcgatgcgctgcttgcggattcaatcataggaggagtgacgcctcggccggtatggacaaacgacgggcagggtttttacgttctcgggagcgagcagggaagcaccggtatttattatatctcgattgacggcctcgtatatccgatccgattagaagaagagtatgtgaatggttttgcttttcatcctgatcagaaaagctgtatcgctgtcattgccaaacccgcacagccttccgagctttacagcatttcgctcgaagatggggaagagaagcaattgacatccgacaatgatcggtttattgaggagcgcatcatatccgtgccggaaaagctgcaatatgaaacaaaggacgggctgacggtaaacggctggtttttaaagcccgccgtttttgaagaggatcaaacttatccgctcattctatacatacacggcgggcctcacatgatgtacggccatacgtattttcacgaattccaagtgctggccgcacaaggatatgctgtcgtgtatgtcaacccgagaggaagccacggctacgggcaggattttgtcaatcgtgtcaggggtgattacggaggcggagattaccgtgatgtcatgcaggcggtggatgaagctgttcaggcgtatccgtttattgacagcggccgtctcggtgtgacgggcggaagctacggagggtttatgacaaattggattgtcgggcagaccggccgttttaaagcagccgtcacgcagcgctccatttcaaattggttcagcttccacggtgtcagcgatatcggtttcttttttactgactggcagctcggacatgatttgtttgaggaagcggataagctttgggatcgttctcctgtaaaatatgcgtcccgcgtttcgacgccgcttttgatcctgcatggtgagcgagatgaccgctgtccgatagagcaggcggagcagctctttaccgcgttgaagaaattgaacaaaacgacgtcgttcatccggtttccgaaagccacgcatgagctgtcgagaagcggccatccggaacagcggatgaaacgcatccgttatatttgttcatggtttgatgactatttgtaaaaaataaaaaaccaggctgtcatgcagcctggttttatgattaaaatacttgttctacttcaacgacacccggtacttcttcaagaagggcgcgttcgattccggctttcagcgtaatcgttgaacttgggcagctgccgcatgcgccaaggaggcgaagctttacaatgccttcgtctacgtcaacaagctcacagtcaccgccgtcacgaagcagaaacgggcgtaatttatccaatacttcctgtacttgctctttcatttcaacctcagtcatgagattcgctcctttcatatacataaaaccattatattcacagtaacggtaaaaatctaatgtttggtttgcaaagctgctttccccattatagcatatttaaacttgaacataaaaaccgttttttatacaaaagctgccccgtcctttgtatactggtgtaaaggggatgatatacatgacaaagccggttacgctcagtgtttacggcgctgaaacgctttgcgcaagctgcgtgaatatgccgagcgccaaagatacgtttgaatggctggaggcggcgctgcaacggaaatatccggaacagccttttcacatgcggtatattgatattgacgcaccgcctcagcaaaaggagacagaagaacttgcggagcgcatcagaaacgatgaatttttctatccgctcgtgctggtggaggatgtcattgtgggggaagggaatccgcatttaaaagatatatatgaagaaatggaaaagcgcggctatgttgcgggctcttaaaaatggccgctgatcgcaatcagcggcttttttcttatcagccgttgtgatgcttgtacatccataaaaggcctgattttaataaacggggcacacgcccgatgagcggacggtcgttgacaagaccgaagcccgctttttttccgagtgaaccgagaacgcctttcagcttaaattgcggcattgtttccggcagctcttcattgttccagcgtttcaggaggatctgcacaatttgttccgcctgtgcttcagccagctgggcgctcggcgcatgcggcaggctcgcgcaatcaccgacgacgtaaacatgctcatctcccggaaggttgtgatgcggtgttaaaacgatgcggccttgcggatctttttcagcgtccagttctctgacggctttattcggctgaattcccgccgtccacacgatggcatcggccggtattccttcatcatgattataaacgatcccgtcttccacttttgtaatattcgcattattgataatggtgacgccgtgttcttcaaaccatttctgaacatacttgctgagtcttttcggaaagcttgataaaatcaggtcgccccggtcaaataacataatcttcagatcgtcacggctctctcttaattcactggcaagctccacgccgcttaatcccgctccgacgatagcgacagatgcattggcgccgaggttgttcagcttttgataggcttcgcgtgactgatcaatggtctgaatgctgtaagtatgttccggcgcgccgggcacgttatgatacttatcctcgcagcccagtccgatcaccgcgtcatcgtaagaaatcggttcgcggtcatgaaacagaacctgtttgtttttcgtgtcgacggaagccacctcaccgtattgaacatccagattcggatgctcaggaaaagacaccctgatatgatgatcagaaatcgtgccggcggcgagcgcataatattctgtttttaagcagtgatacgggtttctgtcaatcagcgtgatggatatatctgacggaagctggttcggcagtaagcggtgcagcacccgcatgtttccgtaacccccgccgatcaagaccaattttttcataatgattccccttttgcccgaaaaatatggtagtcaatgttgttacaaaataacgaactatgtaaaataacatcttgaattatatcgaatttgatctaaaaccacaataatagttttaaaataacctacaaattgaccagaaaacacgtaatagtaaaacctttaacctgaattaatatgttacgataacattgagtgtgaaaccggatctttgacgaatagaggaaattccgttaggataaggtacatatgtgaggtgaaaccgcatgaatccgatgattgaattctgtgtcagcaatttagcgcgcggttcccaggaagcacttgagatcttagagaaggatccgaacttggacgtgcttgaatacggctgtttaagctattgcgggaaatgcatggagtccctgttcgccctggttaacggcgaagtggttacgggaggcacgcctgctgaactggttgacaacatatatacattcatagaagaaaatccgatgttttaatcagaggctccgaacggggtctcttttttattgcgccccgggttttggcaaaataaaaaatttgtagacagcaaaaataaatattgttatcttaataaagactttttttaaataaaattttagaggtggattcattgaatatcgtttgggggctgctcggggcagttgctatattagccattgcttttttgttatcagagaagaaaagcaaaattaacctgcgaaccgtcattgtcggtttatgtttacaaatggccttcggattcatcgtattaaagtgggacgccggacgggccgtatttttatggttctcaagccgtgtgcagcttctcattgattatgcgaacgaaggcatcagctttatttttggcccgctgataaaagtgggcagcagcccggcttttgcgctgagcgttctgccggtcattatctttttctcagcgctgattgccgttttgtatcacttgaaaatcatgcagctcatctttcgcgtcatcggaggcggactgtcaaaacttcttgggacaagcagaacggaatcgcttgcggcggctgcgaatatttttgtcggacagtctgaatcaccgcttgccattaaaccgctgattgcgggattgacccgttccgagctgtttacgattatgacgagcggcctttcggctgtagcgggttcgacgcttttcggttacgccctgttaggcattccgatcgaatacctgctggcggccagctttatggcggctcccgccggtctcgtgttcggaaaaattttaatacctgaaacggaaaaaacgcagacgataaaaggcgattttaatatggacgaagaaggcgaaggcgccgctaacgtgattgatgcagcggcaaaaggcgcgtccacgggccttcagattgctctaaatgtcggcgccatgctgcttgcgtttgtcgcgctcatcgccgtagtgaacggaattctcggcggaatcggcggctggttcggtttcaaacatattacattagaatccattctcggttacgtgttttcaccgatcgcatttgtaatcggcgttccttggcatgaagcgctcggagcgggaagctatatcggacagaaacttgtgctgaatgagtttgtcgcttattcaaacttcggtccgcatattgcggacttttctaaaaaaacgtctacgattatcagctttgcgctgtgcggatttgccaacttctcttcgattgcgattatgctcggcacactgggcggtttggccccaagccgccgttcggacattgcgcgcctcggattaagagcggttattgcgggaacactcgcaaaccttctcagcgcggcgattgccggcatgtttatttagtaaacgataaaagctccctgcatatgcagggagcttttatgtatgaaaaacgggggatatttgtattgtgtccgagcagaagagcttttatactaagtaaaagaaaaaaagttggaggccgatatgaattcattccgttttaccaagatgcacggtcttggaaacagttatatatatgtaaatcaatttgaagaacagctgccggaagaacggctggctgagattgccgttaaagtgtccagcattcacacgggcatcggctctgacggaatgatcctcatctgtccgtcagaaaaagcgcccgtcaaaatgcggatttttaataatgacggctcagaagggaaaaattgcggcaacggccttcgctgtgtggcaaagtacgcatacgaacataagctgacagaagaaacgtcctttttcattgagacgctttcaggtctagtgaaagcagacattacagaggacaacgggattgtgcgtgaagtcgccgttgatatgggcgaaccgcgcctcaccaaaaaagagctgccgatgctcggcaatgaagatgaacggacgatcgatgaaacctttgtttttggagaaacggagctttccggaacagccgtatcaatgggaaacccccatattgtttttccggttgcggatatcaatcaagcgcctcttacaacgctcggtcccgtcattgaaaaagacccgagatttccggaaggcgtcaatgtcgaatttgtggaatccgtcagcgccgatgaacttcatttccgcgtatgggaacgcggctccggcattacacaggcttgcggaacaggcgcctgtgcggcggctgtcgcatccgtattgaacggtgtttccgaacgaaaccgggatatcaccgttcatttagcgggaggcgaccttgtgattaattggcaggacaacgggcacgtgctgatgacgggacccgccgaaaccgtatgcagcggcgtctattatttgtaaacagctcgtttgagaaatactctcctcaaggtttataatagatatcagcatccgttttttaaaaaaggaggtctacctatgagtgttccagtaaccatcactgaagcagcggctttgcatataaaagatatgatgaaagagcatgaagaagaaaacgcgtttctccgtgtgggcgtaaaaggcggcggctgcagcggcctgtcttacggaatgggatttgagcacgaaaaaggcgaaaaagacagcatgtttgaacagcacggaatcaccgttttggtcgacagcgaaagccttgatattatgaccggcacgatcattgacttcaaacagtccatgatgggcggcggtttcaccattgacaacccgaatgccatcgcttcctgcggctgcggttcatctttccgcacggccaaaaacgccggtacgccggaagagtgttaagggtcaacccgccattcttaggatgaaaaaatatgacgtctttctttccggtggcgcttgcaccattgttaaaaaaggcgtttatctgtttaataaaaggaaaacccgctcaacagaagcgggttttcctttttcaaagaggttattcgattgtatgtttcatagcatggtacatatttgccgtatgttcatcggctttatcccgtgacatgcgcagccgttcttctgaagaaccatatccgatttcttgtttgccctctttcagtcctttaaaaatcccatcagcgaattcatccagcggttctccttgagtatgcagccctgctccgcctaaatctgtattcaccgccggaggcgcaacttcaatcacttctacagatgaatcagaaagctgatgtctcagactcattgtaaatgaatgaagcgccgctttcgttgctgaatagatcggtgcaatggcaagcggtgtaaaagccaatcccgaagagacgttaatgaaagccgcatcttcttttccggcaaaaaacggagcgaacagcatagacaggtggaagggagcttcaatgttcgttgtgatttctttattgaaatagtcccaattgtccttcgcatccgctttcagcacatgaaaacgttgttgaatccccgcgttgtttactaacacattcacttccggataattttctttcacccaatcaaacagtgatatacgttcagatggaatgctcaaatcactgacatatgtaataagatccgggaatgtttcctttgctttttgaagagcgtgctcacgccgtccggtcacgataactttatttcccgcttttaaaaaccgttctgcgaaagccaatcctattccggcatttccgcctgtaatcagtattgtatttcccgtcagtttcatattaactcctcttttccgattgtttttacatttctttgtcaacatttcagctttgatccaatcaatatattcatcccgcaaataggcatgaaataagacagcagtgattctgtaaaattgatttttagatcatcgggaaacccgccaaaactattctttccttgtcacaatatgatgatacggcttaaagcacggtttaagtcaacaaaagaaccttgtgcttccgtttcggttactcacatcagacataggtcacgaaaggaaaggtgaacgtaaagtcttggaattttcttaatgcgataaagcgtaccgtatcatatgggtgagaggcaattaaaaaaacgtttctgatcaaaacaaaaggacggcgatgcatatgcaggaaggaaacagcgttgatatcaggccgctcagcttgaatgatgcagagcaggaactggttttgcagacggaaaaccgcatgttttttgaacggtttgccatgacgagacaagaggatttttatacgctggaaggccggaaaaaacgaattgaacaatcactgaagaatgcgaaaaatgatactgaatacagcttcggcatttttcttcaggatcagaccctgattggcacgatcagcctttttcaggtggttcggggttccctccaaagcgcttttatcggttattttttagatggcaaatataacggaaaaggctatgcgacgaaggctgttaagctggcagtcgaatatgcattcaatgagctggaactgcatcggatagaagccggagttatgccgaacaataaggcgtcaatccgggtgctcgaaaaagctggctttcataaagaaggcattgcgagaaaaaatgtaaaaataaatggaaaatgggaagatcatcaggtgctggcgatcatacatccggaggatacatgacgatatcctccttttttatatcctgcgtctctttcgacagattcttcctaaaacttcaaatcaattgtctaaatcatactatttgcaaattcgaaaaaaaataaagggtacatagcaccaaaaactctgaaagatgtgctctttgtcaacacgttctaaagtcatatttttcgaaaggatattgattttttgataggattaaactaaattgtaaaagtatagaatagttaatttattttgtaagaaaaggatgataatatgataggtcaattgagcaataaaaaaatatttttaagttcttttttcatcattttgatctgttcattactcttccaattcagtatttcagataaagttctgcagtcgtattattcttccgtcggagaaaatacctacgatatcggggagaaaagtgttcgtacgattgtcatgtttctgcaagggtttatgatcttcacaacttttgtggaaattctgataggcggatttctgttattcgttgccgcttttattctcggtacaaaaaaaccgaaaaaaatatatttgcttctatatacgctgacttctttaatctcggcatttaaaatgttgattctttcagttgttaactacttaacggctgattcctcgcttatatattctgccggcggcaccagcttgagtctgcagctgctggatccatttctgctcatatcaatcgcggctctttatgctgctgcgggaaaactgaccgatctcagtaaaggcaagagaatcattttgactggatgttttgttttactaaaactctttactattttcttaaactattttatggcggataaaatttagctcgggagagagtcaattaagctgaattttattataaattaaaaaacagagtagggagatgttatgatgaacttagtaaaatctaataaaaagtctttcattttgtttggcgcggctcttgctgcagcaacattggtttatgcactattattaacgggaactgaattaaacgtggcggcggctcatgcattctcagccaatgctgaattagcttctactctcggcatctctacagccgcagctaaaaaagcaattgatattattgatgcggcatcaacaattgcttctatcatttctcttatcggtatcgttacaggcgcaggcgcgatttcttatgcaatcgttgcaacagcaaaaacaatgattaagaaatacggcaaaaaatacgcagctgcttggtaaaatcgatcaataaataattgctctttttgtacaagctgcaaaaagagcctctctcccaaatacatatgtaaggattgaaagtatgatagtcaaacaaattgcggctcttatcaaatataataccctgtcatcgtttcgaaaaagaaaggaagattggggcattcctcaactcaacagcaaactgctgtctgccattattatttctctgttatgtttatatctcgttttcctgggatgcggtgttgtattcgggacaaaactgattcagctgcccctcagcgcatgggggcaatttgttttaatcgccgtttcacttgagcagcttttttgggctgccggcttctttaaagaacaccacaatgcctttctgctggatacgcgcaaggtcattcatcaattaaaaaaggttcgttttttacagctgttttctgtttttgccggccaggcgatcaaaaaaaccattttcgtatggtatctttttgtttttccggtctttttgtttttatcaagcgcaggcatgaccgggtctgcggcggtcatcgtatttttcttgggcttcgtttattttcttctcaatttatttttatctatgctgttttcttatgttgtttatcttcttacaaatatgtggagcaaattgttttacttgaaaatcatgaaaggcattttattcagcgtcagcctgctggttccgcttgcagtcgggtatgccgtttatcttctcgtgtttggggagtataccgcaaaggatatttcaagctttacggagtcaccggctttccggaacatcctcatgaatacgccgtatgtatggttagcattccgctcacattccgtgctcgttttcgccgcggtgtttgcggccgccgtccttttaacggcggggatgtttaaactgtggtcggccacgctgaagaaaatggaccttattccttatatgtttttgacaaacgcagattttgcgccaaagctgaaattatatagaaataacaaaatatttcatgccgtttttcaaaaggacctgctgtttttatcgagaattgacgggttttttatcaggaacttcggcagtatgctgtatttgttcatgctgtttttaggtttttgtattccgcttctatcgcatcattttatcgggtattcggcagccgccatcgtgtctgcggcggttatcattgcgaacttttcgtatcagctcgtcggagatgcgctcaaaacagtattatcagttgacggggaaataaaaaatcagcatctgtttcaccgaaatatcaaacatgcgtggcagctggtgtttccgaaagtatgtatttataatctcgccgctcttatctattcgttcatcatcaccattttgattacggtgttttttccgtcttccgctgcgctgacgatttacttgtttattgtgtttttatgttcgggttttttatacagtcttgtccagatttcaagcaccgccctgtatcctaagaaaaactgggagcatatgtacgaaattggagaagcggggaaagcaaagacgtataacaacttatacggatctttcattttcattgtgtcgcttcaaatcgctgcgatcacgtcgtattttatctataaaaagccggaacttgaaacgatgcttattcattctgcatcaggtatttttgtcctgttcacactattaaactatggagtcatgtttctgtttcttcgcagaatcaatatggcggaaaggtttgcgaacaatgattaaattagtgaatatacaaaaaaactatagtgaaaaacaggtgttgaaagatatttcgtttgaggtgaaaaaaggctcaatttatgctttgctggggactaatggagtcgggaaaacaacgactttgaaaatcatttcgggcctgcttaaaccgacttcaggcagcgtcatgattgacggtaaggaactggattcagaagagggggggcaaatatcggctgatatcggttttgtgcccgaccatgcctttttatatgattacttaacgggagtcgaatacttgcgttttacagcggagatgtttgaagtaccgtctcagcggacaaatgagtatataaagaatatgttagagacgctgaagcttgctcaagacggaaatcagctgattaaaacatattcacatggaatgaaacaaaaattatcaattgcggccgcgctcattcatcagccaaagatattaattcttgacgaaccgctgacgggcattgatttaatcagcggtaaaacgatacggacgttattaaaggaatacgtcaaccagggacatacggtcctgttatcgactcacttgctggagctggcgcattcgctgtgcgatacgatcggtattatacatgaaggcgtttttgcggcggagtatcagtcatccgagcattcattagaagagattgaaaaattggctgagagtatttatacatgatgaaccgcatgttgccggcaatcaggacgtccgccattccgttaaccgcatcattgctgtttttttcaggcggtgtgatcgctgcgtttttttccgatcactttgtttcaacagcgtcttacaacggctcgtcaggcgcggttgaactgctgaaaaacaatgcaatcgcttgtctgtttttagccgcggggttttttacctttgggttgacctcaatcttttatttattcaccaacgggtttattttaagcggctctattatagaaaatctgcatagcggagttcctttttatcagatttttttactgctaattcctcatggtatatttgaagttcccgcgttattattaagtggcgccattggttttaagggcgttgaattggtcatcaggctgtgtttttctaaggaaaaaaagataatggcttcaatgttcaggcatattggaatattggtgctcataattatttgtctgctgatcgccgctgccattattgaagcttacatcacaccaatttttaagtaaaaggggcagaaatcatatgagaagtaaattatcattaatcggtgtgccgattgttatgattatcggttatatcatttctttatcctttgagtggctgtttcctgttcttacttttggggtggcaggactgtatctctttatatttgcaccggtgcaaaataaattcattcgttacatctttttgtttatttttgtgattaatctgttggccagtgcggctctttatttcggtatttaataaaaaaatgacattcatattgaatgtcatttttttattttttttttgcggctctgctgcgtgttaaaatctgtcgccgttgaaaatagagttttttacgatcacgtagtcgacattgcggatggcttcgagtgtattgccgccggcgtaagagatggaagattgcagatcctgctccatttcaaccagcgtgtcctgtaaagaccctttatgttcgacatgcatttttttgccttcgacgtttttcttttcgcctttttgaaattcagaagcggagccgaaatattctttgtacagcttgccgtcgatttcgatcgtttgtcccggtgattcttcgtggccggcgaataatgatccgatcatgaccatggatgcgccgaatcggatggatttcgcaatatcgccgtgcgtgcggatgccgccgtcagcaatgatcggtttgctcgccgcttttgcgcaccagcgaagcgcggctaattgccacccgccggttccgaagccggttttaattttggtgatgcagactttcccggggccgattcccacttttgtcgcgtcggcgcccgcgcgttccagctcccttacggcttcaggcgtcccgacattccctgcgatgacaaagctttccgggacatgttctttaataaattgaatcatgctgatcacggcattggaatggccgtgcgcgatatcaatggtaatataatccggcacaagctcctgtgctttcagctcccggatgaattcataatcattttccttcacgccgacactgatggaagaaatcagtccgcgcgctttcatatcccggacaaaagccaggcgtttttccggctcgaagcggtgcatgatataaaaatacccgttttccgcgagccaggccgcgatgttttcatctattatcgtctgcatgttggccgccacgaccggaagtttaaacgtgcgtccgcccaatgtaactgatgtatcacattcagatcggctgtccacaatgcattttgcaggaatcagctgaatatcttcgtaatcaaatacattttccatatataacacccctaaaagcgaataatagaattaaataaaattaaaatgttcgtctttttataatgtactttgttttgtcaggaatgtcaaatgatttcatgctgcctcatatgcggtcagcttgtcatccatttgcagtttggttatcatagtagtattgggtgttgtaagacatttgttacgatagatagatttgcaaagaagggaggggtcggtgtggaacaaaaacagcccgggcacagcccgaaagcccagaaaattcaggaccggattattttaggcacgatttgggtcgtgtcggcgcttgtcattgcgctcgttgtcggaaccgtcatgaattatatttggatgtttaaataaaaaagagtctgtgccggtatgacacagactcttttttatattatttttcaaacatgcttgtagaatgcattggctggacacgcgctttcgggtccatgtaggccttcgcgttgttcacggctgtcggagcttcgccgaaaccgctggcgatcagcttgactttgccttcatatgtgcagatatctccggcggcaaagaagccttcaatattcgtttccatcgtgcttttgacgacgatggaatttttctcgatgtcaaggccccagtttttaatcgggccgagagaagaaacaaagccgtagtttacgatcaggtcatcaatttcaatgatttctttacggtcgcctttcacttcttcgagaacgagctgttcgatccggtcttcaccgacaagttcagcgggaacaaacggtgtcagcacgttgactttagaattatgcaggttttcgacactgtgctcatgcgcgcggaatttatcacggcggtggatgatgctgacttctttcgcgatcggctcaagcatgagcgcccagtcaaccgcggaatcgccgccgcccagaacggcaacgcgtctgcctgcgaattgattgaggtcgtcaatgaagtaatgcaggtttttgccctcatattgttccgctgattccagctcaagctttctcggcttaaatgcgccgtttcccgcggtgataataaccgtttttgaataatgcgtttctgaattcgtgacaagcttaaacacaccgtccgcctgtttttcaacagattcaacggcctgctctaagcagatggtctgatcgaactttgccatttgctcttttaagttgttcacaagttcttgggcgcggattttcgggaatccggctacatcataaatatatttttcagggtacagcgcgctgagctggccgccaagctgaggcaggctctcgatgattttgacgctcgcctgtctcattcccccgtaaaaagcggtaaacaggccgaccgggccgccgccgatgaccgtaatatcataaacctttgaatcctcttgcataccaaattgcctcctaattgaaaattgttattaattataacatacaatttaaaaggatgacgagtgccgaaaaccgcccggccgcttcattcttgaaaaaaattgcggccgccgctaatatggggacaaattccaatctgttttttcctgaatgttttctgattcttccggatagtatggtgatatgcagacatgtgcggttttctaaaaaattttatatttcatttcataaaatcccgccaataagctgaagctaatacaaatgttgatttgattatgcgtctaacagcaaaaaaaagaaggtggatgtgatggcattgaataaacccaaaatcgtggttttaggtgcaggttatggtggattaatgacagtaacaaggcttccgaagcatatcggggcaaatgacgctgacattactttggtcaataaacacaattatcattatgaaacgacatggatgcatgaagcgagcgcaggaacgctgcatcatgaccgctgcagatatcaaataaaagatgtaatcaatgaatcacgggtcaaatttgtgcaggataccgtaaaagcgatagatgtgcaaaataaaaaggtgacgctttcacaaggggacatcccttatgattatcttgtcatcgggcttggcgccgtccctgaaacattcgggattaaaggcttaaaagaattcgcttttccgatcgcgaatattaatacgtcgcgccagctgaaagaccatattgagctccaatttgcgacatacaatacggaggccgaaaaacgtcctgaccgcttaaccatcgttgtcggcggagcgggctttacgggaattgaatttctcggtgaacttgcgaaccgcaagccggagttatgcagatattatgatatagatgaaagtctcgtccggatcgtctgtgtcgaggccgccccgacggttttgccgggatttgatccggagcttgtcgattacgccgttcaataccttgagagcaaaggcgttgaatttaaaatcggcaccgcggttcaagaatgccgcgcagacggtgtcacagtcggcaagaaagatgaagagccggaagaaatcaaatcccagaccgttgtctgggcggcgggcgtgcgcggacatccgatcgtggaggaagcgggttttgaaaatatgcgcggccgtgtcaaggtcaaccctgatcttcgggcgccgggtcatgatgacgtttttatactcggcgacagctcgctctttatcaatgaagagacggaacggccgtacccgccgactgctcagatcgcgatgcagcaaggagaaacggtcgccaaaaatctgggcggtttgattaaaggaggccagcttgaagagttcaagcctgacattaaaggaaccgtcgcctccctcggtgagcataacgccgtcggagtcgtatacggcaggaagctcaaaggcatgccggcgtcctttatgaaaaaggtcattgacaaccgatcgctctttatgatcggcgggctgggcctgacgctgaaaaaagggaagtttaaattcttctgaaaacccgcggccgcgggttttctcttcttttaaaaaagagcgctatcaaaagaatgtaaaagaaaaaaatgaatgttttcgcttacatgagttattttgttacatattctgacttggtgcttgacaagtaaatatgatatattatcagaaaattaagaaaaagggtgatccgcatgaaaacgacagcaaaaagcacggcggcgtgtccgttctgctcaggtaaagggtattttcaattgcttcttggcggctccgaaacatgtccctcctgccagggaagcggcaaagagagacgctgatttttccagacgttgacttttttaccgcccccgaggtacactgaaagtgctgtagggggtggatgtttgtgattagtttgccggttgtcctgatctcaattgtactattttttgtactgtttttcggcataggctttctgttgaacatgctgcttagaatgtcgtggattatggctgttgtctatccgattgtatgccttttcattatcagcaataaaaagatgatcagttacgtgcaggcgccgggggaatcctttcaaagcctgtttcagcgcatcatgtcattagcggttgcggatgtcgtgattttggcgggcggactggcgggagccatcatgtcaggcattgccataaaggcgctcagaaaaagaggatatcaaatgttttaagccgctttcttattcgagaaagctttttttgtgccgcggcgctttttgtatagcaccccaccgagttgggaacaatgactcggaggagagtgatttcagattgacgataatcagacgcgtattcatgatcgtgctctttttgggcgcatgccatgcgacatacttttccataaccggagttgaagcaaaggatctgacaaattggatgacggaacatcgcggcgccgttttgaaaaacatcggcactccgtttcaatccttacagaatcagccggaaaagaaggcatcaggcaggataaaaccgctggaagaagcttttgactgggaacgctatccgtcacaaaaggtgacggccaccggttataccgccggagcggaatctaccggaaaatctccgggtcatccgcagtacggaattacatattcaggcgtgaaggtcaaacgcgatttatattcaactgttgcggccgatccgtctgttttcccgatcgggacgattctgtttataccgaattacggatacggggttgtcgccgataccggctcaaaaattaaaggaagccgccttgacctctactttgacaccgtcaaggacgtctataacaattggggcaaaaaaacacttgatgtctacatgattaaaaaagggaacggcacagtgaccgaggacgaacttgtaaagctgaacgaaaccaagtcgatgcaagtgttcagaaatcaatacaaaacggtaaaagaataaaaacgcttcagcatccgctgaagcgttttttacataaagaaataatctaaaatcaatgtcagcacaataccggtgacgccgccgaagaacacttcaatcggctgatggccgagcagttctttcagtttcttctgtttttccttctcttccgctttctgaaagtccttcgcttcgctgacaaaccgattaaagtcgatgaccagtttattaatgaccgtcgcctgttcacccgcatgccgcctgacacctgtagcgtcgaacatcgtaatgacggcgaaaatcgcggcgactgcaaacaggggcgagtccagcccctgttccaaagcgactccggttgacagcgcagtgacggcggcggaatgggagctcggcatgccgccggtgctcgtcacaagagaccagtcaagttttttggatacgataaattgaataggcacttttacaacttgggcaaaaataatggcggcaaaactcgccagtaaaggaaaattcataagtacatccatatgcaacatcctttctgtatctgctgattccgatcgtatcgaaaaactgcagaaaacgcccttagtttggtaaaataaaatcaatgaaaaatgttttttcattataccactttacataacaaatacccacataaggagtgtgtactcatgttttatgcatctgatcaactgcggcatcccgaaacactggtcatcggtctttttcaaaaaagcacgctgaacggatttacgaaggaattggatgataaattggacggtcatctgacccagctgttaaaggatggtgatgtgtccgccaaacgcaatcgtgtatcaaaagtataccctccggctgcgaccggtatgaaacgtatttattttatcggcctgggaagagaagcggattattcgtttgaagatacgaaagaatgctttgcacgagtatttcagcagattcatcaagataaaaaacaggaagtatccgttttgctcgatacattcgtctccggggaagtgcctgccgccgatgccgctcatgcgctttcagaaagctgtctgcttgcggtttacgaagtgcaggattataaacataaatcgaatgagccggatcaggaactgaaatcagtctgcgccgtgaccgaagaagacctgagggaagtgcaggccggcctgaacgtcggagcggcatacggccaagggacgaattcagcccgcacgcttgtgaatatgccgggtaatatgctgacggccactgatttggcgtcatatgccgctgagctggcggcaaaatacgatttcgagtgtgaaattttagaaaaagatgaaatggaagagctcggcatgggcgggctgcttgctgttaacaagggctcatccgaaccgccgaaaatgatcgttctgaagtatcagggcaaagatcagtgggaagacgtcatcggcctggtcggtaaaggaattacctttgatacgggcggatattcaattaagccgaaaaccggcatcgtcggcatgaaaagcgatatgggaggggccgcctcggtattaggggcaatggagattatcggcgaactgcggcctgaacaaaacgtgctcgccgtcataccgtctacggacaacatgatttcgtccgatgcgatgaagccggatgatgtcatcgtttcgctcagcggaaaaaccgttgagatcctgaacaccgatgcggaagggcgtctcgtgcttgccgacggcatcacttacgccaagcagcacggagcctctgtccttgtagacgtcgcaacgttaacgggcggtgtcattgtcgccttagggaacgaaatgacgggcgccatgaccaatcacgccgcgttttatgaacaggtggcggaatcggcgaaagaatccggcgagccgatctggcagcttccgattacagaaaaggataaaaaacgggtgagaaacagtcagatggctgatttgaacaattctccgggaagagaaggccacgcgattatggcgggggcattcattggtgaattcgcggaaaacacgccgtgggttcatctcgatattgcgggaaccgcaacggcgaataaagcgacatgcttcggccctgccggcgcaacaggcgtcatggcaaggacgttggctgttttgactgagcgctttacgcccgaaagataacagtatcccgctgccttgatgcagcgggttttttgatttccaaaatctttagttgactaaagcgcagaatatatggtaactttaattatctactacattagcaaactaaaggattttggagggactcatcaatgaatgctgttgttgtcgcagtattgcttatgctcgtcttaagcctgctgcgtgtcaatattattatagctttaatgatcggcgcgcttgccggcgggctgaccggcggcttaggcctcggagagacggtgaaggcttttacggacggtctcggcggaaatgccaccgtcgcagtcagctacgcgctgctcggagcatttgccgcggcgctgacaaagacggggcttcccgatgcaatggtggaagcgtctgtcaaactaatcggaaaaaaggaagattcgcggaaaaaagcactgtcaaaagtattaatcgtactgattattttaatcatatcctgtttctcgcaaaacgtggtgcccgttcacattgcgtttattcctgtattgattccgccgcttttaaaaatatttaacgaacttgaaatagaccgcagactgatcgcgtgtgtgatgacattcggactgactgcgccttatatcgttctgcctgtcggattcggacagattttccaggggatgctgagagataatatggcgtcagccggtttaaaggtgccgctcagtgatatcccgtatgctttaatcatcccgacggccgggatggcggtcggtttaattttagccgtcatcgtcttccggaaaccgaagaaatatgagacgaaggagattgccggactatcgtcttctccttatacgaaaaaaagcattgccatcgccttgatctccattgccgtgtcgcttgccgttcagctctatctgtcacaagtgctcggagtggaaggtatgattatgggcgcgcttgccggcttgtttacgctgtttatcagcggagtcatgaagcgcaatgaagcggataagctgatcacggacggcatgattctgatggcttttatcgggtttgtcatgcttgttgcggccggtttttcaaatgtattgaataaaacgggtgatgtggcttccttggtcaaagcatcaacaggctttatcggccacagccaatcattgggcgcgctcctgatgctggtggtcggtttattaatcacgatgggaatcggatcatcatttgcaaccgtacccgttattacgaccatattcgttccgctgtgcgctcagctcggattcagcccgatggcgacgatcgccgtaatcggagcggccgccgcggtcggtgatgcgggttctcctgcaagtgacagtacgctcggcccgacgtcaggcctcagcgccgacggacagcaccaccacatttgggatacgtgcgtaccgacatttattttctataacattccgcttgtgatattcggctggattgccgcacttgtcctgtaaaaaaaggctcccggaaaggggagcctttttgtatgctgagaacatcttacgccgggtttctgctgaaccccgtcgctttatgaatagacctgtaaacggcaggcgcgattgatgccaataacagtgctaaaacgatatcttttatgaaaaaccatatcatgtaaaaccaggccattccgtagctgatcggagcatgaagccataattttagcgcaatatacgtataggtcgtgccaatgatataaatgacggcggtaccgatcaaagaggcccatgcataatgcaggcggccgggtttttttgttttttccagcagccatccggctgcaaatgccgccgggatataagcgagaataaatccgccgctctttccgataaacggcgcaaagcctgctgagaattgagcgaaaacaggcgcccccgcgagtccggccaatgcgtataccgtcattgcaatggctgcccgtctggcgccgagaagcatcgcggctaacagacaaaagaaaggctgcagcgataacggaattcccgcaacttgcaaaaaaggagccattgatgtaatgttggcgccgacggccatcagtgcggcaaacatgccgataagcgccatatcgcccgcgcgaaggttgcgttgtttcatttgtttttcccccttacacttgtaccagattagcgtaatcgaagggtgattgattgtcaacaaagatttaacacaggtttactaaatggagggagccatatgtttttcgggaaaacgaaacaaacaaaacagtcggaacggattccgccaaatcaaaatgtcacaacgaagtttcccgtgcttcacgccggaaatgttccttattatgaagatatgtcaaaatggaatctgcaagtgtacggacttgttgaccgtcctatgctgttaagctttgaagatatcaaatcctttcctgaagccgaagtgaaaaatgatattcattgcgttacgggctggtcccgtcttgataatatctggcagggaatacgcgccaaagacatcgctgagaaagcgggcgtgcacaaagaagcgggattcgtcattctgcacgctgaagagggctggacggccaacctgccgctttctgattttgcgcgggaaacatccctgctggcatatgcgcataacggcgagccgttaacgccagagcacggctatccgctcagaggcgttttcccccatctttatttttggaaaagcgcaaaatggctgcgcggcattcagttcacaaaggaaaaccaccccggcttttgggagaaaaacggctaccatatgaggggagatccatggaagaatgagcgctttacatgggattaagcccctatcactatatagttcttaggtaccttattgaaataaggtgctttttttatatcaaaaatccattgactttgtttggcaaaaaacctattatttgaggtgtcttttgatattgaaaatcattatcaataagcatagataaagcaattgccgcaaaggggatgaacacataatggacggaaaacaaataaagcggggtttcgcgccggccggccgatacgcggttccgggcacagaagtaagagaaatgcgctcaaaaggaggccgtatgtatcgtatctttgtctcttttcctcaggaagaaccgcctgcatccggcttccccgtcatatacctgctcgatgcgaattccgtattcggcacaatggccgaagctttgcgggtgcaaagccgacggcctgaaaaaacaggcgttgttccggcggtgattgtcggaatcggctacccgacagatcagccgttttccgccgaacgtcacagtgattttacgatgccgctttctgaatcagaactgccggtgcacccgcggggcgcggcatggcccgaacagggaggggcggaagcgtttctgagttttatagaagaagaagtaaagcccgcgatggagcgggattatccgatcgacagaggcaggcagacgattttcggccattcgctgggcggtctttttgtgctgcaagtgcttttgacgaggccggacatgttccagacctatgttgccgggagtccgtcaattcactggaacaagcgttttattcaggaaaaagcggaacgtttgtcagaccggctctctgcggaaaatcttcaagtcagcgtattgctggctgcgggagaaattgaaaaaacacataaaagcagaatcccgcagcacgcagaggcgctgtactctttattatccggatttgaagatgatggagtccgtgctgaatacagcgagtttgaaggagagggccatatttctgtcctgcccgttttaatcagcagggccctgcgtttctgcctgaatccgggaggaccgcataccccgtattctcccgcatgagaaaaaacaggcccttcgaactaaatgcggctgattctaattttctaattgactgcgtgttttgatttggatatgattgtcttgaatcatagttgataatgataatcattatcaatatagaaagggaatgataatatggacgcattgggaatgaaagggaaaacggccgttgtcaccggcgccgctcaaggcatcggagaagcaacagcgcttgcccttgctgaacaaggcgtaaatgtggcagctatagatacaaatcaagacttgcttctcgggcttactgacagacttcggaaaaaaggcgtgcaggcgcaggggtttgccgcagatgtatctgacagtgcggctgtcaatgatatcatcgccgccgttgaacgcgacatgggacctattgaaatattggcgaacgttgcgggcgtgctgcggccgggtccggtgcaatccctcagtgatgaagattgggatcaaacattttctgttaatacgaccggcgtatttcatgtgtcacgggctgtaagccgatacatgattgagcgtcaaaaaggcgccatcgttacggtcggttcgaatgcagccggcgttccgcgtgcttccatggcggcttatgcggcgtcaaaagcggctgccgtcatgtttacgaaatgcctcggactggagcttgcggcccatcatatccgctgcaacatcgtatctccgggttcaacggaaaccgacatgcagcgggcgctgtggcaggacgggaacggagcccgggacgtcatcagaggttcgcttgatacatataaaacgggaattccgcttcaaaagctggcgaagccttctgatattgcaaatgccgttttgtttctggcttctgaacaggcaaaccatattacgatgcatgatttatgcgttgatggcggcgctactttaggcgtttgatgtaacgagaaggagggacaaacatgacaaatcaacatttatcggcggaagtgtctgcaaaagaggtgctggacgcttacaagcccggggcgttctttttagcttccccgaaaagtacgatgcttgcggaaggaatgtttgcggaagtgcctgatacagacgcggaaaatcagctggattcactgcctgaacgcgtgagacagacgcttcttgaggcaaagcaagccggcatcaaacatccgattgcggccggcgccattccttttgacggcagaaaagcttcccggctttttgtaccgaagaatgtccatacggcaggcccgctttcgtttgcggaatcttccgcagaaaagccgcaatccaatacatatgacatccgtcccgttccggagcctgagggctttatgagcggtgtggaacaaggcgtattcagcattacggacggtccgctcagcaaaatcgtgctgtcaaggacgcttcatctgaccgctgaaaaggatatcgacattccacaggccgtcaagcatttggcgcagcacaacccgcgcggctatacattcgctgcggatgtgacgggaacgtcagaaacaagaaaaacgcttttcggcgcaagtcctgaactgctgctgtccaaaaacggaacatcgattctgtccaatccgctggcaggttccagacctcgcagcacagatcccgccgaggatcagagaagagcggaagaactgctgcaatcagcaaaagatctgcatgaacatgccgtagtcgtggccgccgtggccgccgcccttaaaccgttctgccgtgtgcttgatgtgccggaaaaaccgtcactcattaaaactgaggcgatgtggcacctgtccaccgaggtaaagggagagctgcgtgatccgtcaacgacatcacttgagctggccatcgccctgcatccgacacccgcggtatgcggaacgccgacggatgcggcgagagaagcgattcaggatattgagccgtttgaccgcaatttctacacgggaatggcgggctggtgtgatgctgagggtgacggagaatggattatcgcactccgctgcgccgaagcggaaacaaggtctctccggctctttgcgggtgccgggattgtcgccggatcaaagccgcaggatgaattggacgagacctcggccaaattccgcaccatgctccgggcgatggggctttaccaagatgagttgtaaaaaaggagggaacggatcgtgctgactggattttcgccatggccggaagaatgggctgacaaataccgaaaagacggctgctggaagggtgagacgttcggaggaatgttgaaagagcgcgcggctttatacggaaatcaaactgccgtgacgtgtaaagatgtacattggacctacaaagaattagatgaaagggcagatcgtttagcggcggggctgcataagctcggaattcaaaaggaagaccgcgttgtcgttcagctgccgaatatcgctgagttttttgaagtgattttcgcgctgttccggctgggagcgctgcccgttttcgcgctgccttctcatagaagcagtgagattacgtatttctgcgagtttgcagaggcgaaagcatacatcattcctgatatgcattcaggttttgattacagggcgcttgccagacaggtgaaagacaaacttccggatttggcgcatgtcattgtggccggcgaagctgaagagtttcaagaactgagcagcctgcatagagagcctgttcagctggaagaggtaagcccggcggaagtcgcctttttacagctttcaggaggcagtacggggctgtccaagctgattccgcgaacacacgacgattacatatacagtttgcgcatcagcgcggaaatatgcggcttggatcaacacagcgtttatttggccgctctgccgacagcgcataattatccgctcagctcgccaggtgtgctgggaactttatatgccggaggccgggttgttctgtcaccgacgccgagcccggatgactgcttcccgttaattgagaaagaacgtgtcacgattacagcgctcgtcccgccgcttgcgatggtgtggatggacgcatccggttcgcgaagtgatgatttatcaagccttcaagtgctgcaggtgggaggcgccaaattcagtgctgaggcggcccgccgcgtgaagagcgctttcggatgcacccttcagcaggttttcggaatggcggaaggattggtgaattatacgagactggatgatcctgaagagatcattgtcaatacgcaaggcagaccgatgtccccttttgatgaggtaagggttttagacgatgacgggcgggatgtcgcccccggtgaagcgggacatttgtttacacgcggcccttacacgattcgcggatattataaagcgcctgaacataatgaaagatcattcacagccgacggattttatcagaccggcgatatcgtcaaactgacggcggacggctatatcatcgtcgaagggcgtgcgaaagatcaaatcaatcggggcggtgaaaaaatagccgctgaggaggtggaaaatcaccttcttgcgcatcctgccgttcatgacgcggccatggtttcaatgccggacgattttctcggggagcgatcctgtgtgttcgtcatcccgaaaggagaagcgccgaaaccgggagagctgaaagcatttttacgtgagcgcggattagcggcatataaaatccccgaccggattgaatttatcgcttctttcccgaaaaccggcgtcggcaaggtcagtaaaaaggatcttcgcgaaacgatcgcccaaaaagtaaagccggctgaaatcaaacaatcttaaaaaaggaagtgtttacattggctataccgtctattcccgcatatgcgctgccgacagcgtcagatatgcctgaaaataaagtatcttggacgctgaatccgaaacgcgcggtgcttctgatccatgacatgcagaattatttcgtcgatgcttttgcgaaaggtgaagctccgatcacagaggcgtctcagaatatcaaaaaaataaaagagcaatgcaaagcactcggcattccggtggtgtataccgcacagccgggcagccaagacccggcggaccgtgcgctgctgacggatttttgggggccggggctaaaaagcgggccttatgaagaaaaggtcattccggagcttgccccggatgatcaggacattgtcctcacaaagtggagatacagcgcgtttaaacggacgaatctccttgagatcatgcgtgaaagcggcagagaccagctcatgattacgggaatttatgcacacatcggctgtctcgtcacagcctgtgaagcatttatggatgatatccaaagcttctttatcggagacgccgttgctgatttttcttcagaaaaacataagatggccatcgaatatgcgtctcagcgctgcgcttacacagctttgacaaacgaagtgctggagctgctgggcggcgcgccggtttctggaggagaagagaaggtttccgccgtattgacaaaagaccgggtgcgggaacaaattgcggcgattcttcaagaatcaccgtctgatatttcggatcatgaagacctgctggacagaggtcttgactccgtcagaatcatgagccttgtcgaacaatggcgccgtgacggagctgaagtgacgtttgtggaactggcggagaacccgacgctggaagagtggtggagacttctttcttcccgatctcaaaaagtcttgccgaacgcagattatttataaagggagagaatagaatgcatgatacacaacagctgcctctgacaggcgcacaggccggtatctggtttgcgcagcagcttgatcctgataatccgatttacaatacaggcgagtacgttgagataaacggcgcgatcgatgtgaacatatttaaaaccgctctcgaacgcgtgctgacggaagccgcgtcattacacgcccgcttcgaggagggagcagacgggccgaagcagatcatcaatcctccatttgaggctgcgatcgatgtcatagatgtgagttcagaagctgatccgaagcaggccgcactcagactcatgcagacagatttggctgagcccgttgatatggcggccgggcctttgttccgcgacattttatttcaggcgggaccggaacgctttttctggtatcagcgcattcaccacattgcgatagacggctacggtttttcactgctggcacggcgtacggcgcaaatgtacaccgcaatacgggaaggacgtccggataacgggcgctccttcggttctttggaggatctggtaaaagaagatcaagagtaccgcgcgtctgatcaattcctgaaagatcgggaattttggatggagaaatttgcggatgaacctgatgtcgtcagtttggcagaaagagcgccgcgaacgtcaacacgttttcggagaagcacggcttatctttctgaaacggctttacagcatgtaaaagcgattccgaactggcatgaagccgtcacggccgcagcggcggtatatgtccatcggatgacaaacgcaggggatatcgtgctcggtttaccgatgatggggcggatcggctcaatttcactgaatattccgagtatggtcatgaatcttctgcctttacggctttctctccgcccggatatgaattttcatgaggccgtcagccaagtggcaaaagaaatccgaaacatccggcgccatcagaaataccgccatgaagacatgcgccgcgaccttaaattgctcggagaaaatcgcaggctgttcggcccgcaagtcaatgtgatgccgtttgactacgcgcttgatttcgccggagcgcgggggaccgttcataatttatcagcagggcccgttgatgatttgtcaattaacgtttacgacagagcggacggaagcggaatgcgtgtggactttgatgcgaatccggaagtgtacagcgccgaagatattgaaaaccatcaaaaacgattcctgcttctgttggaatccgctgtgaaagaccagacacaaaaaatcggcacactcaaccttctgcttgaaagtgaacgtctccgcgtactggaaagctggaatgacacgcgcaaggccgagaagcagaaaagtctgccggagctgttttacgaacaggccgtaaaaacaccggaccggccggcaatcatcaccgaaaacgaagagctcagctatgccgaattgaacaagcgcgcgaaccagcttgccggcatgctaaaggaaaaagggctcggaccggaacaatttgccgctttgctgcttccgcggtcacaggagttggccgtgggcatgctggccgttttgaaaacgggagccgcatacctgccgcttgatcctgattttccttctgagcggatcacatacatgctcaaagatgcacagcctgcatgcctgattacaacgatggaattatccggccgcatgccggaagacagtgatgcaaaaaggatcattctcgatgacccggatacggtaaaaaccgttgccgctcaaaatgctgactgtcccgctcaggcggaatgttcgcctttgcaccccgcttatatcatttatacatcgggctcaacgggcaaaccgaaaggtgtagtcgtcactttaaaaagcgtaagcaatttcctcttatccatgcgggaaatgtttacgctcggcgaacaagaccgcctgcttgccgttacgactgcggcgtttgatatttccggacttgagctcttcctcccgctcatcagcggggcggggtgcgtcatcgcacgtaaagagacgattcaggaaccgcgggcgcttgcgcacatgattcactcatacggtatttcaatcatgcaggcaacgccgacattgtggcattcattagtcaccaatgaaccggattctctccgggcgctgcaggtgcttgtcggaggtgaggcgcttccgaatgcgcttatgcatgctctgcttgaatcaggctgtacggtgacgaatctgtacgggccgactgaaacaacaatctggtcggccgcacagccgcttgcaaaaggccatacaggggcgcctccgatcggaacgccgatttggaacacgcgggtatatgtgctggacgccgcattgcagcccgtcccgccgggaatcgcgggcgagctttatatagcgggggaggggcttgccagaggttattataaccgtcctgatttaacagcggaaagattcattgccgatccgtacgggcccgcgggcgcgaggatgtaccggacgggagatctcgtgcgctggcgtgaggacggctcgcttgattatatcagcagagccgatcaccaaattaaaatccgcgggttccggatagaattaggagaaattgagtcagtgctgtcgaaatatccgggtatttcgcaggccgccgtcattgtccgtgaagaccagcccggagataagcggctggcggcttacgctgtcgcggatcagccccttgatatcggcggacttcgtgaatatatgggcgaaagcctgccggattatatggtgccgggcgcgtttgtacagctggaagaattgccgctgacaccgaataagaagctcgatcgcagcgctctgcctgcacctgatttttccgctgtcctgtctgacagagggccgcggacgccgcaggaagaaatattatgcgatctgtttgccgaggttctcggtctcgcgcgggtcggaattgatgacgggttctttgaattgggcggacattcgctcttagccggacgcctgatgagccgggtccgggagacgatgggcgcagagcttggcatcggccgtctgtttgatacgccgaccgttgccgggctcgccgcacagcttgacaccgcaaagagtgcgcggcctaagctcaagccgtttgaccggccggagcatatcccgctgtcatttgcgcagctgcgtctatggtttctctactgtcttgaagggccaagcccgacttacaacattccggtgattgtccgcatgtcaggcaagcttgaccaatcagcgctgaaacacgccttttacgatgttgtcagccgtcatgaaagcctgcgcaccgtttttccggaaaataagggatcatctcatcagctcattttatctgctgaagaagcccgccctgtgtttacagtgacacgtgcagacaaaaacgagctccaagacatgcttgccgctgcggcacgatatcggtttgatctcgctaaagagccggccgtccgggccgagctgtttgatcatggtgacggcgagtatacgctgatggttctcctgcatcacatcgcaggtgacggctggtccttgaatccgctcatgcgtgacttatccatagcctatatcgcccggcaaacaggtgaaaaagcagaatgggcgccgctggcgattcaatatgcggattatgcgctttggcagcagcagcttttaggcagcgcgtctgattctgagagcttaattgcgcgccagctggatttctggaagaaaacgcttgaaaatgtaccggatcagctggagctgccgtctgattttccgcgtcccgctgaatcaagctacaggggcggcgtcattccggtcaacatcggccaagagcttcatgcccgtcttctctcacttgccagaaatcagcgcgtaagcctgtttatggtgcttcaatcagggctttccgcgttactgacccggctcggtgcagggaccgatattccgatcggcagtccgatagccggccgcagtgatgacgcattaggagaccttgtgggtatgttcattaatacactcgtactgagaaccgatacctctggcgatccgagcttttgtgagcttcttgaaagggtcagggaaatgaatctcgcagcatatgaacatcaggacgtgccgtttgaacgtctcgtggaagaattgaatccggttcgttcccggtcaagacatccgctgttccaagtgatgctcgcattccaaaatacgcctgaccctgtactcagtcttcctgatatggaaacaagcctgcaaatcagcagtgtcggatcgtccaaatttgatttgacgctggaattggctgaacagcgccatgacgacggcacgcctgccggtattgaaggtctgctggagttcagtacggacttatttagaaaagaaacggctgaagcacttgccggacgcctgcttcttctgctcgaagatgccgcatcacatccggaaaaaccgatcggaagcttaaccattctttctgatgaagagcgccggaagcttttgccggttaaacgggcaaaacagcatattcagcctcggcagacactgcctgaactgtttgaaatacaggccgccgcaaaatcggatgaaacggcggcagtttttgaagagagcggactcacttataaagagctgaatgaaagagccaatcagctcgcgcacatgatgattgcccgcggcgtcggcccggagcagtttgtcgcactggcgctgccgcgttctttagatatgattgtcgggctgttagccgtcctgaagacgggggcagcgtatttgccgcttgatcctgattatcccgcggaccgcatcgcttttatgttacatgatgccaagcctgtatttatgctcaccaaccgtgaaggcgcaagtaagctctctggcgaaaacggcatgccggccttcatcctggatgatccgcagaacaaagaaacacttcggcaatatgccgtcacgaaccctgcggacgctgaccggattcggccgctgtcaccgcttcacccggcctatgtcatttacacgtcgggatcaacaggtgtgccgaaaggtgtcatcattccgcacagcaatgttatccggctgtttgagtcgacgcggcattggtatcactttcattctgatgatgtatggacgatgtttcactcctacgctttcgatttctctgtctgggaaatatgggggccgctgcttcacggcggacgtctcgtcgtcgtgccgcatgacatcagcagatcgccggaagcgtttttacatctcctcgtgaaagagcgagtgaccgtacttaaccaaacgccgtcagcgttttaccagctgatgcatgcggaaaaagaacacaaagagcttgggcgtcagctcgcactcagatatatcatcttcggcggcgaggcgcttgagctgagccggcttgagggttggtacagccgccacgcggacaatcagccggtgctcgtgaacatgtacggcattacggaaacgacggtgcacgtcagttaccttgaattagacaaaaacattgccgaactgagagcaaacagcctcatcggctgcggcattcctgatctgaacgtatatgtgcttgatgaccggctggagcctgtgcctccgggcatcacgggtgaaatgtatgtggccggagggggcgtggcacgaggctacttagggcggcaaagtctgaccgccgaacgctttgtggctgatccgtacggcccgccgggaacgagaatgtaccggacgggggatttagcccgtctgcggacggacggttctcttgattatatgggcagggcggaccaccagattaaaatgcgcggcttccggattgaattgggagaaatcgaagcggttctcgtcaaacatccggatgtcgaggatgccgccgtagtcgtccgtgaagaccggctgggagataaacggctggccgcctaccttgtccgatctgccggcagcaccttggacactggggacatgcgccggtttgccgaagaaagcctgccggattacatgattccgtcagcttttgtccaaatgaatgaactgccgctgacaccgaatggaaagcttgaccgaaaagcgcttcctgcgcctgacttccaaacggaggtcaccggccggggaccgagaacgccgcaggaagaaatgctttgtgagctgttcgcagaggtgcttcatctgccgcgtgtcggtattgatgacagattttttgatttaggcggtcattctttgcttgcggttcatttaatgagccgtattcgggaagcgatgggagccgagctgagtatcggaacattatttgaagctcctacggtggcaagccttgctgaaagacttgagtcaggaacgggcgcaagcgcgcttgatgttcttcttccgctcagaacggcaggagaagaaacaccgttgttctgtgtccatccggccggcggtctcagctggtgttatgccgggctgatgtcttctttagaggctgattatccgatatacggcttacaggcgagaggcatcggaaaaaaagaatcgcttccgcaaagcctagatgacatggcggcggattatattgaaaaaatccgtaccgtgcagccgaaagggccgtaccgtctgctcggctggtctctcggagggaatgtcattcaggccatggcgacacaattacagagccggggtgaagaggtttcgcttttggtgatgcttgacgcgtatccgaatcattttctgccgataaaaaatgcgcctgatgacgaggaagccgtcatcgcgctgctcgccctgggagggtacgacccggacagcctcggggatcagccgcttgattttgacgccgcgctgaccattctccgccgtgagggaagcgcattagccagcctggacgagtcagtgatgatgaatctgaaagacacgtacattaattctgtcgggctgttaggaacatacaagccgaaaccgttccacggagatgtgctgttcttcagatcaacgattattccggagtggtttgacccaattgagccggatacttggaaaccgtatattacggggaaaatcgagcggtatgacttagactgccgccataaagatatgtgccagccgggcccgcttgccgacattggcgcgattctggcagagaaattaaacggacggcgtacagtccggtaaagaaaggaaagagatgatatgacaaatccatttgaacgggaagacggctcataccatgtgctcgtcaatgctgaaggccagtactcactgtggccggcctatctggatgtgccggacggctgggaaacccgcctcacgaatgaaacccgccccgtttgtctcgaatatattgaaacaaactggcgtgatatgaggccggaaagcctgaaacaggccgaagccgctaaaatgtaataagaaaagcctgccgttatttcggcaggctttttatgcggacatcagccgttaagctgtgtatgatcacaaaatgtataagggtggccttcttcatccgtgcaccatgactgagacagaaaagccaaaaagaccgcggcccactggtctgcaaactggattaaaataccgccgtcgtgccacgttccgttatccttcttccagcgtgtatcaattgggtttccctgattcatatgaatattatgcatgccgtttgtcggcttgaacccgaaaatcttatcagcgcccggctccggcccgaatttagagccgtaaatatagacggtggctttttctgatttggctttttgcatgtacgtctcaataaagtcatttaagtcattatccggaccggtgacttcatgcgggaggggcaccatgttccggggatcaaacaatccgccgcggacataatccagcgccagctcacggctggtttcatcaattggggtatatccatacggaatgttgggcagcagggtgatcgcgcttgcatcaaaatgatcgcgtgccgcatacagaacctctgattcttttgaacttgacatgacattgatcgcacagcgatagcgcgtatcaggctcgcctagcacctcgacttgaaaatgcggagcatcatcatctgtttcccttttcatatctgacacagtgccttttaatacaccatagtgctgaacagccatatgaatcctcctttttcttccgggatatgaattgatattcgagacagggggccgtttttccttttatgagaaagaaaaaaggacagcccgctgatcaggctgtcctcttcatatctattaagcttttgcagccgaaccttgcattgctttttcagcaggcacgtagtcatagcctaagtctttggctaccgcttcatacgtgacatgtccgttagccgtatttaagcccgctttaagcgcagggctgtctgcaatggcttgtgccgcgcctttattggcgatttgaagcgcgtaaggaacggtcacattcgttaatgcgagcgtagacgtacgcggtacggcgcccggcatattggcgacagcgtagtgcacgacgccgtgtttttcgtaagtcggattatcgtgggttgtaatatgatcaacggtttccacaatgccgccctgatcgatggcaacatcaacaatgacggaacccggtttcatttgtttaaccatttcttccgtaacgagagtcggcgctttggctcccgggatgagcacggcgcagatcagaagatccgcttccgcgacggaatctgcaatatttacagggtttgacatcaatgttttaatctgatgtccgaaaatatcatcaagctgacgcagtcggtctgcgttcaaatcgatcattgtcacatcggcaccgagtccgacagccattttcgcggcatttgttccgacgccgccccctccgatgatcgtgacttttccgcgggatacacccggtacgccggctaataaaattccttttccgccctttggtttttcaagaaactgagccccgatttgcgcggccattctgccggccacttcggacatcggcgtaagcagcggaagggaacgtccgtccgttaccgtttcgtacgcgatagctgtcacgcctttttctgtaagcgctttagctaattccggctctgcagctaaatgaaggtaagtgaataagaccagaccttgacggaaatacgcatactcttcagccagcggttcttttaccttcatgaccatttccgcatcccatacttgctttctgtcctccagaatttccgcccctgctgatacataatcttcatttgtaaagccgcttccgagtcccgctccggattccacaagaacccgatggccgtttccgataagctgtgaaacgcctccaggtgttaatgccactcgattttcattgtttttgatttcctttggaaccccgataatcatgtctgtttcccccaatgtttgtgtgatgcttcaagtgtagcgcgatttttgcgaaaattctttgtttgaaacagaaaataaaaaaacacggatttgtgaaatttcacgaacccatgctgcgaagtttgatatcaaggtaaatcgtaaacttttcattcacattttttaagtcgatttctgcgatctggctgattcttttcagcctgtaattcaatgtattgacatggatgttaagcgctttagcggcggtgttgacattgctgtcggcatcaataaaatgttcgagcgtttttaccatatcggcttggtgctccctgtcatactgctcaagctttgacagggaatagttcatatagccgctgtgcttgcgtttttcatccaacacatccaggtactgataaatgccgagttccgaaaagctgaaaaggtgtttggtttctctcacaaaccgctctttcgcttttaatacggaaagcgcttcctgataggagcggtaaacataagaaatcgattcgtaaataccgccgaccgcaatcgacgcatcctcaattttatatcgttccttcagctgtttttgaatatgaagggcgaagtgctttacatctttaaaaggctgatcggttttcggcgcggctaataagattaattcatttgaatcaacagtcgccagcatgacatgaatctgctgtgtcgtttcctgcaaatattgcagctgctgttccgtcttttcagtcagctcatcatgtaaacggatgatcatgacgctgaacacggacggcagcgccattccgagcttatgaaacccttcggccatttcggcttcctgataaatatggccggtcagcattttccaaaaaaactcctggccccgctcttcgattttcgttttgcggatctgcaggtgcaaaagtttgttccgcaccgctttggctgccagctgaagtgtcttcagatcttcgtcattgagcttttttttgatctcaagcgcccaaataaatccgagaacctgactgtttttccagatagaaatcgccacgcggttgctcaggcccacctcgtcaatttctttcactttgatcggctggtccgtttttaaaagggccggaatggttccgtctttccagagtttgttgatgactttttccggcaccctccgcccgataatcgtcgacgtccgggccggatctgtacaatcgctgtgcgtgctgtatgcaagcagtttatgattaacgtcttctattgtaatggggcattgaagaacttcactgatatggtcggcaacatcttcaagcctgtcgaaactgtacttaaatggatcctttggattggtcatctgtatccctactttttcatagcttcatatcttgatcttaccatcttgcttttcagactgaaaggcatctttgcagggaaatagactaggacaataagatcattcgatgaaaacgaaaataataagaaaatcatactactacatttacaaaatgtgtaaatataccgaaaaatccaatatatcataagactcattttgtaaaattaaaacagatttgtttgactgtgccgaatggttgtttttataataatgacgttcaaaaaataagtgaattagcccatatttaggctgatgacacaggagggtataaggaatatgtctggattaattcgtgtcacacccgaagagctaagagcgatggctaagcaatatggcgttgaaagtcaggaagtcatgaatcaggttgaccgcctgaaccgcatgatttctgatttgaaaggcatgtgggaaggtgcttcaagtgaagcctttgcagatcaatatgagcagctgaaaccttcatttattaaaatgtctgaattgcttcaagatgtgaatcatcagctcgatcaaacggcaaatacgcttgagtctactgaccaagatatcgctaaccaaattcgcggataataagatgaatgaagaaacggagcgcctgattcaatcaagaagacggcgctctttctatgtaagggtgatatgaatatgtatatcgatattacaatagatttaacacattataacggcagcgtcttcgatctcagattgtcagattaccattctgtgaaaaaagtcattgatattgcccggcaggctcagcatgtatccgttccgccgcgtgaaggctattggatcagagtggtcaataaagaagcggttttttccggagaacaaaagctatctgactgcggcattacgaacggagaccgccttgaaattttatgaaaggacatggtggaatgacaggtcataacagatcttatttagaaacagaattagacgccgtccgagaagaaaccgaatcaggcttcacgttcaccttccagcgggaaaaaatcaagcttcttgacgggctggaagcaaacgtgattaaagatgctgatcctttttttcaaaaagaggtctcagtttcagaagacgaagtaaccatcacaatcaaacctccttcttcttatcaggctttccgctatataaaaggaaaagataaaaaaagcaggtggcaatttgcctaccgtctcgtccaagccgtgaaacagcataagctgaaacgtctcaatctgattgccgcccctgaaaatatcgtgtttgataaagcgctgacgccttactttcttcattacggcgtaaaggagagccttccgccttatgaggaagatagagaaagggtgttaaaagagctcaaagcctgtgcggcgcttgcagctgacggggcgtacaccttcgatgaatatttgaagtacaaggagacgcttcacttctctcctgaggtgaaaagcgtgctagaggcggagacgattgaagaactggaagaaaccattcaaaccgcaattgattccctcgaagaaagagacaagacatacataaaactgccgaaaaagaaatggaaaatccaaagatacgccggtctggcgcttgccgtcctccttgtgccgacacttctttactccttatacgttctgtttttcgcccagccaaagcaagaggcaattacggaaagcaaccgctattttttaaatcagcagtacagcaaagtcattgacacactcgccaaatacgatgcggaaagcctcccggaatctgtgcagtacgagcttgcttcttcttatgtggcagttgaaaatctgagggaagagcagcggaaaaacatcgggaatctggtcacgctgcaatcagacccgaagcatttcctttattggattgatatcggcagaggggaaaatgaagaagccatcaaaatcggccgcaatcttgagtacaacccgtacatctggctcggacttacaaaatataaacagcaattattagcggatgacagtatgaaagacgacgaaaagcagaaagaactggacgccgtggaaagcgagcttgcgaaggcgaaaaaagaggcggaggagcagcataaagaagcggaggaaaacggtgacaccgccgaagcttccgccggacaggatgaaagcaaacaagacaaagcgaaagataacaaagagaacgacaagaaagatgagaaaaaagatgaaaaaaaataacagcacacatcaaatggccgcaggtaacgatcaggctgtcaggaggttcgccatatgagtctgttatgggtcttttaccgagagcacgtacaaaagattcagctgtctgaactcccgccgtctcagccgattacgatcggtccggatatgaaagatacaatcacggtcggcacacttccgttacggcaaaacgccgcaaccctttatcgaaaagaaacagatcgttatgatgttttcctgggaaataactgtgccggcgaattgacaataggaaatgaaatgccctgccggattgaagaagagacgatgcggcttctgctcacccctgacaaagaagaatcctccgtttattttatcggcgggaaggatgagatcgttttctcatcagaaacagaggaagcggatatatacaaagagccgtcctccgctcaaacaggggctttttatctgcgaaagtcgggaggatgctggtctgtcatccctgatggccaggacgtttatgtgaacggaaaacttgcagaagctcctgaaaggctccgcacgggagatgagctgctgtggaattttctgcgtgtgaggctgacggaggacgaccttttagaaatcgttcatcacgaaaagcttcaaaccggtttaaccaaaacggtaaaaccaagcaccgaaatgaaaaagaaatacccgcaatatcgaagaacgccgcgtatggtctacgatcttccagaagaccgcgtttcattcagctttccctcgcaggaaagcgaacagaataaccgggggctgtggctcgtcattctgcctcctttggtcatgctgattgtaatgggggttgtcgccattatacagccgaggggcatattcatccttgtctctttggcgatgtttatgatgactctcattacgtccaccgtgcagtatttccgtgaaaaaaaccagcggaaaaaacgggaggaaaaacgggagcgtgtgtacaagcagtatttagaaagcaagcggaaagagcttcagacgctgtcggaaaaacagctgcaagtgctgacgcatcattttcccccgtttgaaaaaatgaaatatttaacttctgaaatcagcggccgcatttgggagaaatcgctggaaagcagggattttctgatgcttcggctcggaacgggcacggtcccggcaagctacgagatttcaatgagcggcggagaccttgcgaaccgtgatgtggatgacttgatggagcagtcgcagcacatgcagcgtgtgtataaagatatccgccatgcgcccgtgaccgttgatttacaagaagggccgatggggcttgtcgggaaacctcagatcgtcaaaaatgaaattcaccagctgatcggccagctcgcgttcttcaacagctaccatgatctgcgatttgtctttatctttcatgaggacgaatataaggaatgggaatggatgaagtggctgccgcaatttcagctgcctcatatgtacgcgaaaggatttatttacaatgaacagacccgcgatcaattgttatcgtccatttacgagctgctgcgggagcgggatttggaagaagataaagaaaagaagatcttccagccgcattttgtctttgtcatcacaaatcagcagctgatcgcagagcacgtcattttagaatacatcgaaggccggcatgagcatctcggcatctcggcaatcattgccgcggaaacgaaggaaagcctggcagaaaacattcacaccctcgtccgctacattaatgaagatgagggagacattctcattcagcagaaaaaagcggtgcagatcccgtttaagctggacaggcatgaacggacaaacaacgagcggttttcccggacgcttcggacattgcaccatcaggtcggaatgacgaattccattcctgaaacggtctcatttctggagctgtttcatgcgaaggaagtaaaagaaatcggcatcagacagaagtgggagacaagtgagtctgcaaaatcgctggctgttccgatcggctataaaggaaaagacgacatcgtctatttaaacctgcatgaaaaagcgcacgggccgcacggattgctggcgggaacgaccggctccgggaaaagtgaatttctgcaaacgtacatcctgtcattggccgttcatttccacccgcatgaagcggcgtttttgctgattgactataagggcggaggaatggcccagccgttccgcaagatgccgcaccttctcgggaccatcacgaatattgaaggaagcagaaacttcagtatcagggcgcttgcatccattaagagcgagctgaaaaaacggcagcggctgtttgatcaatatcgcgtcaatcacatcaatgactatacaaagctgtataaacagggagaaacggatattccgatgccgcacctgtttttgatttcagatgaattcgccgagctgaaaagcgaagagcctgactttatcagggagcttgtcagcgcggcccgcatcggacggagccttggtgtgcatttaattctcgccacgcaaaagccgggcggcatcattgacgaccaaatatggagcaactcacgctttaaggtcgcgctgaaagtgcaggatgcaagtgacagtaaagaaatcctgaaaaacagtgatgcggcgaatattacggtcaccggacgcggctacttgcaagtcggaaataacgaagtgtatgagcagttccagtctgcctggagcggcgccccttacatggaagatgtatacggcaccgaggatgacattgccatcgttaccgacaccggcttaattccgctgtctgaggtggacgcggatgatgcggcgaaaaaagacgccccggcagaaatagaagccgtagtcgaagaaatcgagcggattcaaaatgaaatgggcattgaaaagctgccaagcccgtggcttccgccgcttgccgaacgtatcccgcgcacgctttaccccgcgcaggaaaaagaccgcttcttcatcgcctgcgttgatgagcctgatcagcaaagacaggcgcctctcgcttatacgatgatggatgacggcaacatcggcattttcggctcatccggctacggcaagtcagtggctgccatcaccttcctgatgaacttcgcggaaggatacacgccggaagagcttcatatgtacatctttgacttcggaaacggcacacttctgccattggcaaagcttccgcacaccgcagactatttcttaatggatcaaatgagaaagatcgaaaaattcatgatccgcatcaaggaagaaatcgagcggcggaaacggctgttcagagaaaaagaagtcagccatatcaaaatgtacaattcgctcagtgaagaagagctgccgtttatatttatcacaattgacaatttcgacatcgtaaaagatgaaatgcatgaattagaaacggaatttatccagatttcacgcgacgggcaaagcttaggcatttacttcctgctgaccgcaacgagggtaaacgccgtccgccagtcgctgttaaacaacataaaaacgaaagtcgtccattatttaatggatcagtcagaaggatactccatttacgggcgtccgccgttcagtctcgaaccgatcccgggccgcgtgatgatccaaaaagaagaactgtatttcgcgcaaatgtttcttccggctgaagcggaaaatgacctcgagatgttccaggcgctgaaagccgatgtcaaagcattagctgagcgccacgccggaacagccggcccagacccgattccgatgcttccggataggctgacggccggcgaattttcactccgtctcggcccggatcaagagccgttccgcattcctgtcgggcttcatgaggaaaaggtcagccctgtgtactttgatctgggcaaaaataagcattgccttatcttaggccagacacagcgtggaaaaacaaacatcctgaaagtgatgctgaatcacctgctgcgtgaaggtacggaacgggtcgggctgtttgactcgattgaccgcggactgtcgcagtatgcgcaggaaacaaaggtcagctatctggacacaaaagaagacgtccggcagtggatcgaaacggcagaagccattttcacggagcgcgaagctcagtatgcgcaggccgtcaaaaatggcgatgtgtacaaactcagtttctctccggtcgtgttaatggccgacggcattacaagattccagcagacgatcgacaccgccattcaggacaagctggcgatgtttatgaaatcttacgcgcatgtgggcttcagttttatcccagcgggcaatcacagcgaattctcaaaaggttatgattccttaacgacggaaatgaaacagatccgccacgcgatgctgcttgtgaaaaaatccgaacaaaatgtcattccgctgccttaccaaaggcaggaaccggacattcagccgggcttcggctatttggttgaaaacgggaaagagcaaaaaatccaaatacctttatgttcagcggaaagggaggccgtcagatgactgaacaacgaaaaagcctgatcaaattaatagccgcggtcgtcatcattctgctgctgccggtgctgtttttccggtttatcggcgatgacccgggaaaacaaaaaatcaacgccacccgccaaatcgcagtcgtgaatgaagacatgggcttacaaacagatgaaaatgaggaagaggaatccgtccatttcggcaaagaagtagcggccgctctcggcggccgtccggattattcatggacggttgtcaacaggagcgcggctgaaaacggtctggcggctaagaagtatgacgccgtcgtttacattccatccgatttttcaaaagatatcttaagctatgacaaggagcgtccgcaaaaagccacgctgacattcaatattcaaagcaacctgaacgccgtcaacaaagaaaaggtgcagcgtgagctagaagacgcccaaaaatcaatgaataaaaaaatgtcggcattatattggaatttcgtctcgcaaaaagtgaacaatgtccgaggcgattttgacaagatcgtcaataaagaatcagagtttcaaaacgtcatgtacaacttttacaagccgagctccaatgacttggcaggtgaaatcaagcggcaaaaagacctgattgacgaactgaaaaaatcaatgaatgaagcgcagggcgcggcaaaagaaaaattgacctcggcagatgaagccaaaaccacgctcaaagactttgccgatacggtcgagcgctataaacaatatcaagaaaatcagaaaaaactgctgatggtcgcgcaggaacaaaatcaaaagcaaatcacaaccggactgaatgccattaaagcacagcaggccgccaaccagttcagcacgatgatgagcggactgtcctccggcataaaccgggcgcagacacagcttgaccagacgggatcggctctttctgccgcccaacaggtgagagaagcgcaggttcctgatcaggaacgcgggatggcgaatattcaatccaatttactggacaattatttgactcaatataaagctcaagcaagatttgaaacactgaacagtatccaaacccttatgaaaagggatcggccggcattaaccgttccggaaaaggacccgggtgatgacggctcggatgaaccgaaagaagaagaaaaaccggaagaagaaaaacccggcgatctgaaaattgaccttgacgatcagcgtgacgagttaaaacgcatctccgctgaaatcaatcacatttctgaaggattaaaagaaccggaaaaagaaaatccggcccctgaaaaaccgggccaaggcgatgacggtgaaaactccggcgataccgatccgaataacggaacaaatcccggagaagacggaaaaacggaagacggcacaaaagaagagcagcctgcttcccataacacaggcgatcaggagccaaaaaccgtccagaccgcgacagccgctaaaaacgtcactccgcctgctgatgagccggcggacgacccgaacgattctgaaggggacggcggcacggacatatctgaggcgaaagaaaggctgaaccaagccgcagagcggattcagcaaattgaaaaagagctggaagagaaacagcagactcataatgaagaactgaaaaaacgtctcgatgctcttgatgaagaaatccaaggccttcaagaccagattgatgacgtcaaaaaacgtgcaaagaaaaagctagaggaattgaaagaaacgagaaaacaagacttcaataccgtttacagattgattgtaagaacagaacagaacattttgaactacccgtcattggatagcggccgcaaatctgctcttgaacagatatttgccgctgacatcaatacaaaagtgatatccgatttaatgagttactataatgatttatccctgtatgaggcgacactctatcactctcttgacgcgggctcgctgcctgatgtgaaaaacagggtgctgaaagctcagcaaggcgaagtccaaaccgttctcgccatcaaaccggaagaaacggcaagctgggaaaatctaaaaaacaacaaaatgcagacagatgaagacatcagcaatttcattaaaggcatgaccgaattctcggataactacagctcgtatatcagagatgaacaagccggagtgctcgatgagctcgccagcatttcagacagcgcggcgaaagcatccgatcagctggctgaaggcgccgtgcaggaagcggccgcgttcagcggagacggattaaccggaacgatggcgctcggcgctcaggataccgtcggccgcgaagtcctgcaaatgtctgacacgatgggccatctgtcagaacgccagtccggcatcatcagctataccgacaatatgcagcaaagcgtaaatgatgtccagcataaagcggacaccctgaacagcaactggggcaaaaacgtcgattccacgaaattgatcagaaatgacgtgtacggcattttagggaacgcgctcgttgacggacaggaaaacggctatgtttacgattatctcgccaacccgcttaaaatcagtggagaggtgccggaagaccgggttcagaatgttccgccggtcgtcattttggtgatcgtcctgatcagcagtcttctgatcggctatttcagctcgtattatcagcaggcgccgcttcttgtcaaaggcgcgctctttgggattttaaacattatggtcggattgatgatcagtctgttcggtctgaatatctactcgcttccggacgatcagacgattaaatggtcagtctttacgattctcttgcttgcggcgagttcagcttttatccgggcagcctttgtcttcagctcaatcaccggatggattgcatcatccgcgctcattctcttttatgtggcgcctttgatcgacctgattatgccgaacttcacctttgacagtccggtttcgaaagtctatatcgatattcaatacggaacgggccatctgtttgcgatgggggtaacggttcttgcgatcattacgctgattgcggcggcgcttccgctcgtcattcggctgtttgcggaaaaaacggaggaaagtgatcagtcttatgaggcgtaacacgttcatggaaaaaggattgctgctgtttgctctctcctttttccttttccttccccaagccgcagccgcgaatgaggaaaatactgatgtcaagccgaatgaatatgaaaagaaagacattgaaattcgtacggattacctgcacgacgatgcctactccgaggaaaaaacggcgcttccgaaagaacagaaggatattacctttgatcagccggccgaaaacccggatgacaaactgatatcaaagttgtttacatcgtcagacacggagccgaatacgatcaaagcgcaatcgaaaaaactgggtatcacatttgccgagcctgcggtgcggcatacctcggcagatatggaaacggaggagaaaaagacttcttatctgctgcctgtcatttatgccgtcttgatcctcctcgggattgcggcgatgatctatttgatcccgaaagtcacggcgcaggaaaaggcaaagcggtaaacggatcgcttgtgtttgcgggaagacagcccgtaaaataagaaaaaaaggaggagtttcatgcagttttttcttataacaggcgcgtcaaaaggcttgggccgggcgctgacggaacaggcgctgcaagaaggagccgaagtcgccgcgctttcaagaacgataagcggggaaaagcgtgaggggctgacagaatacagtgttgatttaaccgatctggcagatacagagcggcagatgaaggcgattcttgatcaagcagaggagaaggggtactccgccgtcacactgatcaacaatgccggaatggtggaaccgatcaagcgggcgaaagaggcttccgccgaagaattgaaccgccattacacccttaatctgacggcgcccgttttgctcagccaaatgttcacaaagcgtttcgaagcgttcagcggcagcaaaacaattgtcaacatcacatctggcgcggcgaaaaatccttataaaggatggagcgcgtattgcagctcaaaagcggggcttgatatgtttacgagaacatttgggtttgaacaggaagatgaagagctgccggtccgcatgatctcattctcgccgggagtgatggatacagacatgcaggccgtcatccgttcttcgtcaaaagaagatttccatgacatcgagcggttccgcaatctgaaagaaacgaaaaacctcagaagtcctgaatacatcgccggcgtcattcactcactgatcgcgggcgagccggaaaacggacggatatacgatatcaaagaatttttgtagagcagcttttacgctgctcttttttgtttgtacaatcacttcggggtccggcggcatatgatgaatgaaacaacgtataaggggtataagaaatgtatcagatgaattgagtttcttctcgatttatgttaggattctaaaaatataaataaggaggggtttccatgagaaatgtaacgttaatggatgtcttcacccatccaatcgcacaaaagtatttacagcgttccggtgtcgcccatgcgatcgcctgcgcgtttcatgcataccgtcttgccgtaaaagcaggtgtcagcccggatcttgcggcgaaagcggctttactgcatgacgtcggccattatgaatggtacacagacggcaaatgggattatgaaaagtacagaagaaacgatatccatgccattaaaggcgcggaacgggcgcataagctgctcatccggctcggtgaagaaccgaaagcggcgaaggacattgcgctggcgattctgcttcacaccgattcctatctgcccgaaggcgaactggacaagaatacgctccagcaaatcgtgaaacaagcggatgaactcgatgaagaacccggcgggcatcaccattaccgccaaatggatcacacggccgcgctcaaacaaatccaaaagcttgatcagttaattgaccaagcccaatatcccataagaagctcagtctaggccactcatgcggccttttccgcttacataactccgcatgctcactaacaccttttccgctccgatagacgtactgtgtcaaagcctttgtccgctgcatatgctgaaggaaaacatagtaaaggggatcagcgaaaatggcccatcaaggaagcccgcaaatcgtctcgttagtggacccttacgtttatcagaccatccataaacttatcggctcaaggtttatcattcaaaccgtcagacgcattgtcagaggacggctgattgatgccactccggatcacatcgccattgaagaaacgcatgaccgtgtattttatatcagaaaccgccatgtggtttccgtcatgcctgattataccgaacgcgtgtaacagcccgaataaggcgcaaaccggaggcggccctatagaaccccggtgcgtcttcttttttgagatacatagatgcacggcggctttttttggtacaatcacagtacaagttcacatgacaataggaggaaaccgcttgttgaaatcaaaggtccatttttggacgctgcaaattttgctcgttttgctcattatttacgtatcaacgaaagtttcgtttatttttcagccgtttttcggttttatcaccactctgttttttccgattttgatctcgggcattttgtttttcatttttaatccgatcgtacgcctgcttgagaaaaaaatcccccggacattggcgatcctgctcatttatctcgttttcatcggcctgattgcctttatgttcaccgccatcggaccgattgtggcttcccaggtcacggggctgattaacaatttccctgattacattcatcagattcaagtcttgacggcgcaattatcccattccaaatggtttacgtggatgatgacgcaggattatgtgtcgatagaaaaaatccagcagtctctgacgggatttttacaaagccttccgcaaaatattacggcaagcctgtcggccgtgttcggcgtcgttacgaatatcacgcttgtcgtgatcaccgttccgttcattttgttttatatgctgaaggacggccggcggtttccgctcttggcggttaaaatcctgcctacttcctaccgggcggaaggtcgcaaaatatttaatgacttatatgtcacattggccgcctatttccaaggccagctgctgatttgtctctttgtcggaacggcatgctttatcggatattggatcatcggcctgcagtatgcgttaattctcgggatggtgatcgccgtcaccaatatcattccgtacctggggccgtttctcggggcggcgcccgcggtgattatcgcgtttatggattcgccggctaaggcgctgtttgccgttattgttgtcgttgtcgtccagcagcttgacgggaacctgctttctccgcttgtcatcgggaaacggctgaatacccacccgctcaccattattcttctgcttatcggagcgggcagtttcggcggcattctcgcaatgattctggccgtgccggtttacgcggttttaaaagctttcgtcttaaatatcgtccggcttatcaaacttcgtcagcggtcaaagctagaagacagccgcaagccgaaataaaaacgggcacaactcccgatgcagcgcataaaatgctgtaaagaaaagcggaggtgcgggtatgcctgcaattgtgggaccgatttatattatgagtttagccggagacgctgcggcgagcttcggtgacgtgtttgccatttctcccaaagccgttgaccactcaggcgcgggggcaggggcgtttcattccggagattttgtcaaagtcactaataaattcagcaaaacgcgctttgaagacatcgatgtgtttgacgaacctgattggtttaacgcgtgacagcctccttttaggaggctgtcgcttttttgtagtataatagaatcagtctttataaaaggggaattttttatgaaaatcagaaaagcgaatattaccgtgcagtccggaatgatcggtgatgtatatctgcatgaaaataaaaaagaacagcatacccttgtagccgttccggaacttgagtggagcacgatcatttcctatgaggaagagaaaaaggcgctggcgcagcggcttttacaatcattcagcaagctgattgaagaagaacccgccggagagctcgccggcaagatctcccattgggtggctgaaatgtaacgaagcggtttaccgcgtcccgtccggggagataattgtaaaacaagctgaggagggacaggccgatgagcgacaaaacggttgacctttatttacagcaggggatgtacggccctctgcagacgaaaccggatgaacgccatttatttttaggctcgctgcgtgaaagagtcatcattgccctgacgaaggggcaggtgctgcaaaagcagccgtatgaagaagtgaaacaggcgctgaaaagccgaaaagacgcggtgctctatataaacggaaggctcccgtatcatgcttattcaccatatatgaagcttgccgcacttgccggtgtccgaagctccgtcatatcggatcttcaattcgaaacgccgctcggcctggtttttgccgccgattatgccgtgaaccttgacggcatttacgtacaggatgacatttttcagcgctcactcctgaaatcttaaaagggcaaaacaccgtttgtcattttacaatgccaattcacttacaagtggagataggatataatggttttcatatgaatggcggggaggccggctatgaaaaaagcatttatatgcattgattatacgaatgattttgcagcagagaacggggcattaacctgcggagaacccgcgagacagattgaagatacgattgtcagtttgacgcaagcatttatagaaaacggtgattacgttgtctttgcggtagattcgcatgatgcagacgatgactttcatcccgagacacgcctttttcctccgcataatatcaacggcacggagggcaaagagctgtacggaaggctatcgcctctttatgagaaacataaacacgcaaaaaacgtaaattatatggaaaaaacgagatattctgcttttgcgggaacggatttagagctgaaactgcgggaacggcagatcactgagctgcatcttgcgggcctgtgcacggacatctgcgttcttcacacggcggttgacgcctacaacaagggctttcagattgtcattcatcaaaacgctgtggccagctttaatccggaagggcatgaatgggccctgtcccattttaagaacagcatcggagcgcaagtggcagagtaaggaaggggaaaataattttggtggagcatggttttaaagacgacagtttgtctttacatacagatctttatcaaattaatatggccgaaacgtattggagagacggcattcatgagaaaaaagcgatttttgagctttttttcagaaagcttccctttgaaaacggctatgcggtatttgcgggcttagaaaaagcaatcgaatacttggagaacttcaaatttaccgacagcgatctgaattatttaaaaacggaattgcactatgctgatgatttcattgagtatttacgggatctttcttttaccggatctctttacagcatgaaagaaggcgagctcgtttttaacaacgaaccgattatgcgggtcgaagcgcccctgatcgaagcccagctgattgagacggctctgcttaacattgtgaattaccaaacattaatcgccacgaaagcggcccgcattaaaggcgttgtcggtgacgaagacgccctcgaattcggaacgcggcgtgcccatgaaatggatgcggctatgtggggagcgagagcggctctgatcggcggcttcagcgcgacgagtaatgtaagagccggaaagcgttttaatatacccgtatccggcacgcacgctcatgcgctcgtacaagcgtaccgcgatgaatatacggcatttaagaaatatgcggagacccacaaagactgcgtgtttctcgtagatacgtacgatacgatccgttcgggcatgccgaatgcgattaaagtcgcaaaggaattcggcgaccggatcaacttcatcggcatccggctggatagcggggacttggcgtacctttcaaaaaaagcgcgtgaaatgcttgatgaagcgggtttcacagacgcaaaggtcattgcttcaagcgatcttgacgagcacacgatattaaatctgaaatcgcaaggagcgaaaatcgatacgtggggcatcggcacgaagctgattaccgcatacgatcagccggccctcggcgcggtttacaagcttgtcgccattgaagaggacggcaaactgactgacaccattaaaatttcgtcaaaccctgaaaaagtgacaacgccgggaagaaagagagtataccggattatcaacaagctgaatcaccactcggaaggtgattatatcgcgctttatgacgagcgggtaaatgatcagaaacgcttaaaaatgttccatcccgtccacacgttcgtcagcaaattcgtcactgatttctatgcgaaagacttgcatgagccgatttttgaaaacggcgttttatgctatgataatcccgaaattaccgacatccagcaatacgtgcaggataacctcaaacttctgtgggaggaatacaaacggatcagcaagccggaagaatatccggtcgatttaagcgaagactgctggagcaacaagatgcagcggattcatgaaatcaaaagcgagctgaaacgggaacttgaatagaagacaaagcggcctttcctttctctggaaaggcctttttgttgtgataatatttttcacatttagacaaatttcgtcaagttatttgatatacttatgttcgaaggccgcatctaagggggtaaatgaatgaaggtgtttgttgcgagacagcctatcttcaacagaaacgaacaggttgttgcttatgaacttctttaccgggagagcgaagagaaccgttattcggccgctgatggagataaagctacgacggatctcattattaacagctttatcaacatcggaatcgaaaagctgactgaggggaaacgctgctttgtgaattttacagaaagcctgatgttttcagatctccctacctcctttgatcctgaccagcttattatcgaaattcttgaggacataccgatcactccggcactcatctcaagatgcagacagctgaagaaattaggatatacattagcacttgatgatttttacgccatcaatccggaaaatgaagagttagtggaacagctgatgaaatatattgatattttaaaaatcgactttttgcaatcctcgcgtctggagcgcaaaaaaatcattcagacgtacagctgtaaaagtctgatttatttagcggagaaagtggagacgagaaaagattataaacaggcggccatagacggctttcacctgtttcaaggatattttttcagtgaaccgcgtgtcatcagcggaaatgatctgacgtttcattttcattcttactaccagcttttaagcgaattaaacaatgaccagcccaatatacagcgcgtgacggaatacatagagcgggacgtcagcttatcgtatcagattctgcgttttttaaacggatcgcaaacaaggctgaaaaaaaagatagacagcatccagcaggccatcatgatgcttgggctgaatgagattaagcgcttgatttacattctttcattcagagatttaacggcgaaaagccactcaagccaaaaagaaatcattaagatttccttaatcagggccaaactgtgcgaactgctggcgaaaagaaccggaaggccccagccctcttcttacatgctgatcggcatgttttcgctcatcgatacgcttctccacagggagctggaggatatcatcaaagaactgcctttaatcgatgaagtcggacaggcgctgctcggttatgaaaacgattattataagatgctcgcgttcgtcaaagccattgaatgcaacaactgggactgtgacgagtggggaaaagaactgaacaaagaagaagcgtatgaatgttacttacaggcgatcgaatggtgccggcagctgatcgtggattgagccgctttaagccgaccacctgagggcgatggtaaaccggctttgctctctgatcagactgacacggatgccgtcgggattatacgtcacgtcaaagtcatttttgatgccggtctgcttaatgagccgcttgaccgctgcggtgtcagatgattgcgctgcggtgaggatacggcgcgcaagctcttttgacgccgacagccgcgcaaggagcaggcgcgcttcctccagcatgcccgcagcctcttttgcggacgctgtcaaaatatctgcgtgaaccggggcactgggcgcaggatgccggtatggcgcggcgaaaacaggaaagcatggatacacataatgcatacggcggcctccttcctgagaaaacattcgttatacatgagtataggcggcatgataacgagttatgacatgcaaaagaccacaatgcgggggttgcggtcttttcggtgtttgtcggtggttatgcgacgctgttcgcccattctgttttgaaattgcgacggcagggactatagtccttgccggtttgtcggaaaaccgttaaaaaaacagcagaaccgccagattggtctgcttcatcctaaacgtctgcctttctggtagttatatagtcctgttcgctaaatgctccattcgggactataggattaccccggtttgcggtgtcacgcagatacttttacacatacttttcggtgaaaaatcccgcaaaaacgtttacactattagtaacagatcaaatacctaggactcgttcaccatacacaattcattgatctttcaaaaaaaggagtgtggaaacggtggaaaacaaattagaagaagtaaagcaattattattccgacttgaaaatgatatcagagaaacaaccgactcattacgaaacattaacaaaagcattgatcagctcgataaattctcatatgcaatgaaaatttcttaaaaagacttggaaacaagtcttttttttgtgcattttttatccatttcgtggataaagtattatacgattgttaaaaaacgaaaaacctgctgtctttcatcacctgcatttagtaaaatagaatgggagggtgaagacaattattgagcaaatgtgtttagatgccgaaacgattaaagagaagatgaaggaaattgtggagcacaatatatgcaatactaacttgaaaatgtaccttctaaaatttattgcatcaaaagattcattcggatttgctgaattggcatatcaacattacaaagcgttcaatggcagagacacagaggcaattttaaagttagccgtaggcatagaattattagtcctgtcatacgacatttatgatgatttagaagataatgataatctgaaaatggaatggatgaaaacaggtctccccattacgctgaatactgtaacggccctctatacattaagtatacaggttatgaatcagattagtgaaaatccgtattttcttaagcaaatattaaactttgctttgaattcaattgagggccagcaagatgatattttgaatgcaccgcaaactgaagaagagtgcttgaaaatgattaagaataaatctggctctttaactgcaatgccttgcgttatgggcgcgatgctggctacaggaaagttaaatccaatcgttcaatcatattcatatgaactcggaataatatcccagattgataatgattatcaaggtttgttttacttgaataatgattttgttcaacgcaaaaatacacttgcttatttatacttaaaaaagagattcaataaagcttctgaagaaatcttacaatggtatgaaaacccggagttattcaaaaccttaaagactcgagacataaaaaagaaattaattgaagcaggtgtaacccaatacttattggttttgaaacatttgtcgttaaaaaaaataaaaagtaagatatttgaattggaaatagaaagaaataaaacggaaactttattaaatgcgattgttaatttagaggaggatgaaaaataatgcaggaaattgtaggatacttaaccaaaaatccagaagttttaaataaagtgattgaaggcaatgctagtctgattggagttagccaggatcaaacagattgtgttataaatgcgtttaagggtatagatgttatttctttcggcggtgattggaaatattgaggatgatataaatgaagtccaagtacaataagatttcagttgtcttaattctgcttacattggtatatgtcatttatctgacttatataagcacaaataatcttttagtcggcgccacaatttctgaaaataaacagggcgaaattaaaataaaagatgtagaagattttacaatggcatattacgccggagtgcaaaagggagatatagtaaagaatattaaccaccaaaatgtaaagtcaattaatattcaaatgaataagctgaaaaatgtaaactcgatggtcgttgatagaaacggtcatgatattgagattaagctcaatttatttaatgataggaacttcagtacttacttaataccgataattttttatgtagtatgtttattttgctgtttcttcatcatcaaaataaatgaagaaaaaaacttgaaatctgctttggtgctaattgtatttcttttgtctgcttcaatcgcatatattagtgctggaggatcggcaaaaggcgatttgcttagcagatgcatcatgttgttaacattaataactgtacctttaaattatcttctgtttctttatcattactttaaagaattaggtacagtgcttttcagcaaaaaagttttcgctttgtatttatttccaactataaatatattatttgaattattccggtcgcgattatcttttggtgattttattccaaaatttaatttgatttcgttttttcttctttttttgattgtagcatattactttattgttattttgagaagaaacaaagatactgatcaggcacatattataaaggtgcttgtggttataaatatattggcattttcgccttttttatgtctgtatcttataccgtatgtattttttaatgattattatgtctcttctttcttaacagcatcatttatgctgctgatacctttttcacttgtatatcaattcatgtcgaataaaatatataacgttgattttatcttaagtaagttaaaatattacggctttttagcgttaaccccaactataattctggttacgacaatagagttattacgtgagccggaagaaaatttttacaatctcaaactgacatttttaatttatattttaatgttagctgttttttattataaagaaatactcgatttccggtttaaattaaaaagggtttctgaaaggttcaattaccaagacagtatttataagtttacccaattaatcagaaactcgtcttctttaactcaggtttttggagaattaaaaaccaccattctcgaagtaactcttacaagtaaagtgtatatatttgaagttacgtatgatgggaatgtaaaggcatttgacgaaagagattcaagtttgatagatgattatcaagtgcttttaaatagtactggtgaaataggaaaaataacggagtttaatcaaggtttcgcaatgaaagtaggagaacggggagatagatcattcgttgttctctgtttgtctaagatgaatacgccccgtttatcacgtgaagaaatttcttggttaaaaacattatctttttacgttaatgtttcaatagaaaacgtgatgaaaatcgaagaacttatgaatcatctcgaagatttaaagaaacaagagacaaacccggtctggctcaaaaagctgatgtttacgatcgaggaaaagcagcgttcggatttggcccgtgatctgcatgattcagtgctgcaggacttgatttctttgaagcgccagtgtgagctgtttctggccgattttaagaaagaagagccttgccagttagaggtgcaggacaagcttcatcagatgaatgagcagatgtcggatgtcattttgatgacccgggagacgtgccatgagctgcgtcctcagctgctgtatgatttgggtctggtcaaggcggtatccaagcttgccgcgcagcagcaggagcgtgcgccgtttcatatccgtctgaatacgggccggtttacggcggcgctggatttggatacgcagctgaatttgtaccgcattattcaggaatttctttcgaacgccatgaagcattcacaggcgaatgaggtgctgattatgctgatcagcattcaaaataaagtgattctgcattatgaagacgacggtgtcggctgcaatcaggaaaaaggcggcggccagtcgatgagcatgggtctttcgggtattaaggagcgcgtccgtgcgcttgacggacggatgaaaatcgacacaagtgaaggaaacggttttaaagtagatattgaaatggaattgtaaccaatttatcaccaaatcgacttggcagaagccaagtctttttaataaaatggaaatgagtgagtaaaagggaggaaaccatgaaaaagatactagtgattgatgatcatccagctgtcatggagggcaccaagacgattctggaaacggacacgaatctttctgtcgattgcctcagtcctgatgccagtgaacaattcgttctccggcatgatttttcagcttacgatctcatattaatggatttaaatctgggtgatgacatcagcggcatagagctttctaagaaaatcttaaaagagaatcctctctgtaaaatcattgtctacacaggctatgaggttgaagattattttgaagaatccatccgcgcgggcctgcatggcgccatcagcaaaaccgaatctaaagagaaaatcatgcaatacatatatcacgtgctcaacggacagattttagttgatttctcctatttcaaacagctgatgacccagcaaaaaacaaaaacgtcttcttcccctcaaagtgagcaggatcggttaaccccgagagagcgccatattctccaagaggtcgaaaaaggtttgaccaatcaggaaatcgcagatgcacttcacttaagcaagcggtcaattgaatacagcctgacatccatttttaacaagctgaatgtcggctcccgcactgaagcggtgctgatcgccaagtcagataacgtactataaatcttgaagggagaatgacctatgaatctgaacaatacattgctcggcgcactcggtattgaaatcactgaaaacacaccggagagatgcgtggcggtgatgccggtggataagaggacggtgcagcctttcggatatctgcatggtggcgcgtcagcagcgctggcggagactgttgcaagtgtcggggcccagcattttatcgaccggtcgaaccaggcgtgtgtcgggcttgagattaatgccaatcatttaaaatccgtgaaagagggcgggacggtcacggcgattgcgaaacccgttcacacaggcagggcaaccattgtgtacgggattaacattttcgatgaacgggaaaggctgatctgtgtttcccgctgcacgctggctgttataacaaaataaacaaacagccggaaccctgaatcgtccggctgtttgtttttacaaatatgaatcttctttacgtttgatcacaaagtttctgatccctttgtaatcatcctgaacgcttcttttatcaagcgccgctcccgaattgtacgcggccctgcatatgaggtgcgctccgaccggcgccgtcagcaggataaaaatgatgccgagcagtatttttacagaaatttctccggtcagcatccacaagtagcctaacaccccgagcaataccaaattaacgccgagtgtcgagccttttgaagaggcgtgggcgcgcgtatacacatcaggaagcctgagtgtgccgaaagacgcgaccaggcagatcagcgatcccatcagaatacaaacggcgacggcccatttaacgatttcgatcattttcgataatctctcctttctccaaaaacttagcaaaggcaatcgtgccgataaacgataaaatgccgagcagcagaatgatgtccaaaaaggccgatgtgtttaagagaatggatacaagcgcggtcatggcaatcagattaatgccgatcccatcaagcgcgacgacccggtccggtatcgtaggcccttttatgacgcgaatgacgtacagaagagtcgaaaccgccataatgccgagtgataattgcagaataaacgtaaacatcagcggctcacctcctgaatggctttctcaaaagagacgcggatgtcatggatcgctttctccgcatcttcaatgtccatggcgtgtatatagagaatcgaccggtcatcggagatatccatcacgagcgtacccggtgttaaagtgattaacagcgagagcagcgtgatctcccaatcctccgtcaattccgtcttaaacgcgaaaatgcccgggcggatgttcagtttcggcgatataacggttttcagcacgctgacattggccaaatataattcctttataaagatcagcgccagtttgatgactgaccatattttccaaatataaaacggccgcgagaagaagcgccggaaaaaaaacagcgccgccaagcccgcgataaatccggtcataaaacccgccgcgctgaggctgtttgtgagaaacatccagcaaacagcgagaagaacatttaataatagttgaaaagccatgccatctactccttcaaaacagcttcaatgtatttttccggattcagcagattctcagccgtctgattgacatacggtgaaacccattcggttccgagcccgaacagaagcgacaaaaggagaaaagcggctgccggataaagaagtccttttgcggaccgtccgcctgcgccggggccggggatttctttttcttccccccaaaaagccgtcgtaaaaaccttcagcacggaatagagcacaagcaggctggataagagaatcaatacggaaaacaatgtttcccccttatcgaacccgccttccgcgatcttcagcttgcccacaaatccgctgaacggcgggatgccggccagagatatggctgaaataaagaacatccatcctaaaaggggataacgggtgatcagtccgcccattttatgcaggctggcagtgcccgtcaatgcgataagcgtgccggcgagcatgaacagcgctcctttaatcagcatatcgtgaatcaagtaataaaccgctccttgaatggaggccggcgtgttcatggcaatgccgaacaaaatcacgccgacggctgtaataatattgtagatgacgattttcatgacatccgaaaaggcgatagatccgattacgccgaataacaccgtcagcatcgcaagccacatcatcaattggtgggtaaagcccgtatcgtgaataaagatcagggtgaatactcttaaaatggcgtacaggccgactttcgtcaaaagagacccgaataaggccgaaatcgcagccggcggggcgtaataagagcccggcatccagaaatacagcgggaatatcccgccctttaaaccgaaaacgacgagaagaaggacgccgatgacggttatcagcccggtctggcccgattcacttatttttacgcttagatcagccatattcagcgtgcccgtcaccgcatataagtaaccgacgccgatgacaaaaaacgcggatgacacaatgttaaacacgatatacttcaatgattctcttaattgaattttcgttccgccaagcacgatcagcatgtaggacgcgataagcagaagctcaaaaaagacgtacatgttgaacaggtcacccgtcaaaaacgctccgcttacgccggccagaagaaactgcacccctgaataatagaaagcgcgctcccttttttctccgatggagcggaaggagtacaggatgacgagcagcccgattatggcggttgtcaaaacaagcagtgcggcaagctgatccgcggcgagcacaatgccgtacggcgctttccatccgccgagtgtcagcgtctgaatcccgtgtgtgaaaacggtctgaacgagagcggcgctgatgacgatggagacacaggaagcggcagtgctgaatatccgcatcagcatcacgtgcctgttcataaaaatcagcagcactgcggcaagcagcggcaccagaataggcaatatcacaaagttattcatgttgatcatttcccctcattcgatccatatcgtccgttttcagttcctgataggcgcgaaacgccatcacaagcaggaaggacgtgacgccgaacgaaataacgatcgccgtcagtatgagtgcctgcggcagcggatcgacaaacgacgtgctttttccgcccagtatgggaggggcgccttttttcagtccgcccatggtcagaagcagcaaatggacgccgtggcttaaaagcgcggtgccgataatcacgcgcagcagacttttagaaagcagcaggtaggttgccgccataaacaaaataccggcaatgacagacattaagatttccattattcttcctctccaatcgtttgaataatggtcatcgtcacgccgacaacaacgagatacacacctaaatcaaacaaagtggccgtcgcaagctccgtattcccaagcacagggagatgaaaatggccgaatgtatgggtgagaaagggtgctccgaataagaacgaacctgcacccgttgcaatcgcgataagcagacccgcgcccgccacataaataaaattgacgggcaaaatcgatttgacggtttttaaatcaaaggccaaaagcaacagcacgatggccgaagacgtaatcagtccgccgacaaatcctccgccgggagcgttatgccccgataaaaataaatagaaagagaaaagcagaatgataaaagatacaagcttcgttgccgtctgaaggatgatgtcgtttgtgttttgctgtctcaacgctcttctccctcctcttttactttcgttctgatcatgccgtaaataccgagtgcggcaatcgacagcaccgtgatttcaaacatcgtatcaaatcccctgaaatcaacgaggatgacgttgacgatattgtttcctcccccgagcttatggctgtaagcggtgaaaaaggaggagatgctgtcttttgttttttcgctggaagacgcgattccgagcattgtcacgatgacgccgacaccgagagaaatgataaaattcgtcatccggaatgttcttgtcttctttttccgccgcattttcggcagatgataaaaacaaagaagaaataaggcgacggatatcgtctcaatgacgagctgcgtgagcgccagatcgggcgctctgaaaatcacgaaaaacagcgcgagtgtgtacccgacaacaccgagtgagataatggccgtcagccgcgatttggcgaacacagtcgcaatcgttgcgctcaccataacgagggacagcacgatttcatacaggccgatttcagccatgcctttcgctgtcatggaaaagccgccttttgtgacgaacgccgttccgatgagaatgataaacgccgcaaagatatacagcagataatcccgcaaaaatccggtcatataagatgacgtcagctggtaagatcttttttccatactgcccgtcaccgcatcgtaaagcttgttcagcgtcagttttttcggaaacagaccgtacaaacgctcccatttagacagcgttacgtaaccgatcgtgccgacaatgatgatgccgagggtcatcattacctcagccgtcaccccgtgccactgggaaatatggacatggaatgtatctccgccggttaacagagccggataaatggagttcatcgccggttcaatcaggctgtaagacaaaacgttcggtgcaaaaaacagactgacggcgcaagcggcaagaatcaccggcgaaatcagcatgccgagcggtgcttcatgcggcgtcttttcaagctgatcaggtttgcgcgcgccgctgaacgttctgaaaaacagcttcatgctgtagatgaaagtgaagacgctcccgatccatgcgagaacggggaacagcacgccccacgtatccaggctgaaaatatctgcatgagcaatccgcagcatacttgtaaagaacatttctttacttaaaaagccgttaaacggagggaggcccgccatggaaaacgttccgatcagtgaaacggtgaacgttaccggcataagcgccatcagtccgccgagcctgcggatgtcccgtgttcccgtttcatggtcgataatgccgaccgccataaataaacttcctttaaaagtagcatggttaattaagtgaaacacagccgcggtgacagccgccgtaaaatactctgaatgctggtaatgaagcgcggcggctcctgcgccgagcatcgatacaatcataccgagctggctgactgtggaaaatgccagaatcgcttttaaatcggtttgtttcatcgcattaaaggaagcccataccatcgtgatcagaccgactgaggcaaccgtccaaaaccagacgggtgaaaatgcaaaaaccggactgaatctggcaatcagataaatgcccgctttcaccattgtagccgagtgcagataggcgctgacaggagtcggcgcctccatggcatcaggcagccagatataaaacggaaactgcgctgatttcgtaaaggcccccaataacaggagaaccatcgccggaataaagaacggatggcctgcgataatatgcacctggttgaccatttccctgatactgaaagaatccgtcatcagatacagcaggataaagccgccgagcatgcacagcccgccgccgacggtaatcagcagtgacttttccgcaccgtagcgtgatttcttccgcttatgccaatacccgattaataagaaggatgacaggcttgtcagctcccagaacatataaagcacgataacgttatcgacgagcacaacgccgagcatcgcgcccataaacatcagcaggtacacataaaaggggccgagcttttctttgtccttcgataagtaaaaaatactgtaaagcgtcaccaaagagccgatgcccgtaatcaataaagcgaataacagcccgagtccgtcaagataaacggtatagttaataccgagggacggaatccattcggccgcatatcggacggtttccccagccattgttacagggagcttgctgataaagtaaacaaacagcacaacgggcactatcagcacaaaccagcctgtatggacttgttttacccgtttataaagaaagggaacgataaatgcaaataaaaaaggcgccaaaatcgcgaaatgtaacagctgcaacagaagacctcctttgcttgttttttcatcaagcaactgctttatgtaagagtgaattaatcaattcacggtcataggacccagtacaaattatatcgcacttttttttaccctgctacggcataatgtattcctctctgtgtttttgtggtcttttgaacccaaaataaatttatcaaatatcctgatctttgtatatacatttatctttcagatcaagcttttaaaaaaggagctggtcagatgaagagaaaggcggcggcctgtattggaatattttgttctattattgcaggaacattcatagcggacgatttctgcaaaacgcggcagcagacggaggcagataattgggagcgtttttttctcggtgcggaatacgcagaagacaagctgagtgcggctgaatcaatgcaaacaccgtttcagccgcgtgagtatatcagaatcgtatatagatgaaaagagttccggcaccagggtgcggaactcttttttgtggcaatcagcgttttcctttaatgtaagggatgccgttggctttaggcgcatccgcgcggccgatgaagccagcaagcgcgagaatggtcagaatgtaaggagccatcagcatgtatacattcggaatgtctttgaacaggggcaaaagcgagccgataatgctcaaactctgcgcaaatccgaagaacagcgccgccccgagcgcgccgatcggatgccatttgccgaaaaccagcgcggcaagagcgataaagccttgtccggaaatggtggagtgcgtgaaatcaagcgcgatcgtggaagcatatacaccgccgccgagcccgccgaacagcccgctgatcatgacgccgatatagcgcatgccgaacacgttgattcccatcgtatcggccgccatcggatgttccccgacagaacggatgcggaggccgaacggcgttttgaataaaataaaccaggaaacaaaggccagtacgatggctaaaatcgacgtataatatacgtcggaaaagaaaatctttcctaaaaccggaatatcgcttaacccgggaatgttcgttttgtaaaagggctccgggattttatcagtctgcgcctttccgtagatcagcttgacgataaacagtgtcgctcctaacgcgagcatattgatcgccacaccggttaccgtctgatcggcgcggaaagaaaccgcggcggccgcgtgaatcagtgagaacagtccgccggcaatcatagccgcagccaaggcgagccacggagcggcggcgccaagctcgcgtccgaaaaataagttgaacatgacgcttgtaaaggcgccgataatcatcagtccttcaagaccgatgttgacaactcccgatctttcagaaaacacgccgccgagagcagttaaaataagcggagccgcatatacgagtgttgccgggacaataatggataaaatctgcaggaagtccacttacttcgccccctttttcttcaatttatcaaggatgagacggatggcgtagcttgatgccacaaacaaaataataatggcgatgacgatgtcaacgacttcagaaggcaccccggattcaatcggcatatttaatgccccgactttaaggccgccgagaagacatgccgccagaacaacgccgattgccgtgctgccgccgagaagcgcaaccgcaatgccgtcgaagccgacgccggtaaaggcgcccttaaccgccgcgtattgaaaggttccgagtccttccatcgcgccggcaagccccgcgaaggcgccggaaatcatcatggcgtacatcatattttttctgacgctcattccggcgtattgtgcggcgtgctggttaaagccgacagcccggaattcaaatccgctttttgttttatgaatgataaaccacatgaggactgccgcaaacagagcgatcagaatgccccagtgaaggcgggagtaatctgtcagctgctctaaaaacggcgagcggagcgacgcgctttcatgaattttgtctgttttgtcccggtggtccgtcatgacatcggaaatgagataattggttaaatgaagagcgatataattcatcatgatcgtgacaatcacttcgtggacaaaaaaacgggcttttaaaaatccgggaatcaggccccaaatgccgcccgcagccgcagccgccaataacgaaagcggaaggtggatgtaagcgggggcgtcaaaggaagcgccgacccacaccgcggcggtccagccgacaaggagctgtccttcaaccccgatattaaacaggccggtccgaaatgcgaatgccacggccaatccggacaaaatatatggcgtaatctggcggattgattccccgatgtaatacacttctccgaaaatgccgctccaaagagccgaatacccgcttacgacattgtagccgctggcgagcatgatgaccgcacccgcagctaacccaaggatgatcgcaatcagcggcacagccagatgagaaagtcgattaatcatgtgttttccccgcctccatttgcttacttcccgccattaaaagtccgagctcctgctcgtttgtttcaagcggattgacgtttgcgatgatgctgccttcaaagatgacggcgatgcgatcgctgagattcattatttcatcaagttcaaaagataacagaagcaccgctttaccggcgtcacgctgctcaatgatctttttatggacgaattcaatcgcgccgacatcgagtccccgcgtcggctgggccgcaattaaaagatccggatttctgtccacttcccggccgataatggccttttgctgattccccccggagagagcgcgcgcaggcgtatattcatcaggtgttctgacgtcgtattcttcaatcaggcttcgcgctttgtcataaatcgtgtgtttatttaatatgccgaaagaagagtagggcttttggtaataactttgcagcacgatattttctccgatcggaaaatcaaggacgagcccgtgtttatgcctgtcctgcggaatatgcccgatgccggcttcagtgactttcctgggcggcatgttttgcagctgtttgccgtttaacgtgatcgtgccggcattcgtttttctgagacctgtaatggcttcaattaattcagactggccgtttccgtcaacgcccgcaatgccgacgatttcaccggctctgactgagagggagagctgtttgaccgcctcaacgccgcgcgcgtccttaaccgttacatcagaaagtgaaagcacttcttgtttcggctcggccgcttgtttatccgtcttgaatgacacttcgcgtccgaccataaggcttgccagttcatcttgatccgtatgtgcgacatcgagtgttgtaatgccttttcctttccggatgatggtgacacggtcgcagacttccataatctcttttaatttgtgggtgatgaggatgattgattttccttcattgacaagatttttcataatctgaatcagttcttgaatttcgtgcggggtcagcaccgcggtcggctcgtcaaaaatgagaatgtcggcgccccggtagagggtctttaatatttccgcccgctgctgcataccgacggaaatatcggcaactttggcttcaggatcaatgtgcaggccgtaacggtcggaaatatcgcgcacgtcccgggcggcgcgctgtctgtcaattcggccgaaagttttcggctcttttccgagaatgatattttctgagacggtaaaggtatccacaagcataaaatgctggtgcaccatcccgatgccgagatcgttggctctgttcgggctgttgatgtgaacgcgttcgccccgcacccggatctcgcctttttccggctgatacaggccgaataaaacgttcatgagtgtcgattttccggcgccgttttcaccgagaagggcgtgtatttcgccttttttcacttgaagcgtgacgtcatcattggcgacgattccgggaaactccttgcgtatattaagcatttcaatgatataatccaccgatttgacgctccttttcagagatactttgatgagaaagagcttggcaaaagaaaagctgcaagagatgcagcttttccttcaccgctcttttcataaaagagaggggataagcacggaagtctccttatcccctggttcttactcagccttgaaggatttcaattctttttcagttgaagggatctcgagtccgtccgcgattttcttcttccaatcgtctgttgctttgatgacatcgtcagaaaggttctccttgtgatccgagatgccgactgcatcttgcgccaaaccgtatgttaatgttttgccgcccgggaatttcccgtcacttgcttttttcgttaagtcctctacggctgtatccacttttttgaccattgatgtcagagtgacattgtcttttgtgcctttgacttgaccttccgcgtactggtctttatcaacaccgataacccatacgttccgcttcggatcttcttttttcagatttttcgcttctgtgaagacgcccgttcccgttgcgccggccgcgtgataaatgacgtcaacgcctgatttgtacatgctttcagccgtcgccttaccgacatcggctttgtcaaatccgcccgcatatttcacttcgacggtcgctttcggatttgcggcttgtacacccgcgcggaagccgatttcgaattttttgatcaattcagactccattccgcccacgaatccgacttttcccgttttgctcgatagcgcagcggccgctcccacgaggaatgaaccttcctgctctttaaatgtaaggctcgccacgttgtcttttttgacaacggcgtcaatgatcgcaaaattggtgtctttgcgctgatcggcgatttcgctgatggaatcctgcatcagatacccgacgccgtaaatcaggtcaaagtgttcccgcgctaatttatttaagttcgttgtataatctgcatctgattttgattgaagatagtcaaaaccgcttttgccttttgtaagcccgttgtcttttccgaatgcctgaataccttcccaggcggactggttaaatgatttgtcatcgacaccgccgatatctgttaccatgccgacggtaaagtttttgctgccggagccgtttgctttgtcacttgaaccgcatgcgcttaatatggttccggccgccgcgatgagcgccatcgccattccgattttgcgttttttcaaagatataacccccctgtaaaatatggctgtgccgttcaattcagacttgagtccccgtaccggatgcagaatcgaaaaaactttctgataataatgatgagacgtctctctttttcccgccttgagcggctgtctcttccgggttcgggacttatgacttatctgaaaagatctgctaaccaatcataatttatcattttacccgccataaataaatagaaatttgcttattttttaaaaaatatcaattttatgaatcggcttcctcatctggataaaacagaggaggatcagccaggtcattatccttatatagcatacaaaaaaggaatctcaagccttttgtcacgggatatgacagtaaaaaagcaccgttcacagcggaacggcgctttttgacattataaatattgtttgatgctgctgacattgccggtgttgatatgatattggaagacgggtctgccgatcgtgccgtacgccatttctacattcagcacttgtatgtcttccagaaatttaaggtatttccggatggagacttgcgagatttcagtatgcttggcgagatcttctgtggtaaaagagccgtcaccgaaagactcaatgctcgcccagatgagtttaagcgtgctttttgtcaatcccttcggaaggtgaaccttttccgccgcttctttcttttgaaaaagctcggcatccaattctttctgtgtcatgcttctgtgtgattgataaactttctgcttgcgtctgtagtcggaaagagcggtttgaaagcggtcaaattcaaatggtttgattaaataatcgacggcgccgtaccgaagcgtttttttgatgacgtccagctcgcttgcggccgaaatgacgatgacatcaaccgattcattttgtttgcggatttccgttaaaagctcaagcccgttttttcccggcatgtaaatgtcaagaaggatgagatcgatatgatgctcgctcagcacgtgcagcgcgctttgaaaggatgatgcgatccctttcagctgaaatccttcaatctggctgagatagcgtttatttaattcacccaccatggggtcgtcttcaactatgagtacattaatcatcattttcctccttcggttcatacggaatgcgaagactgaaagtcgttccttcattcttttcacttgtcacaatcatatggccttttaaattttctgttgcctgctgggtgaaatagaggccgaacccccggtttgtccctttcgtggaataaccttgttcaaaaatacgggcttggtctgccgcagacattccggctcccgtgtccgtaatctctatatcaagctggcgatcctgaaaccgcatcgagcacgtaatgttttttttcggcatctgcgccaccgcgtcgagcgcgttgtttaacaggtttccgataatcgtaatgagctcatggatgacggctggatccgccgcattcgggatcaggctgccgagctgaatgtccagatcagcgccctgttcgcgtatgtagctttgttttcctagaagaaaccctgcgagaaccggacttttgacatcacttataatctcgcttgtttccgtcttctgctgaatggcaatgtctttaatgtaagtgccgagatcatcgtattcttttaactggacaagccctaaaataacatgaagcttattcatgaattcatgagactgggctcttaatgcgtttgcatacattttaacaccggacagctgttctgctaaatgtttgacctccgttttgtccctgaacgtggcgatcgctccgacggtttgtcctttcagatgaatcggaacctcattaaagaccagctcaagcccgttaatgcggatatccctgtcctgaagcggttttttcgtttcaatcacttgtttcagccggcttttcgggagaatatcgttcacatcttgatcgaccggattagtcggaatacccattttaataaaaagccgtttcgcttccgcattggcgagcttgatttttccccgcgcgtcaaccgccagaatgccttccttcgttgattcgagcatggcgctccgctcttccaggagggtggcgatttcataaggctcaagaccgtacataatgtttttgacggtgcgggcgacaatgacggctccgatgacgccgacaaaaatacttacgcagatgatgaaataaagcggtctcaaactgtggctgacgacatcctgtattttgttaagcgaaattccgaccgaaacgacgcccacttgttttttatcttttccatagatcggtacgaaggctctcatggattttccgagagttcccgctgatgtgctcgttttgatatgcccgtgcatcgccggctgttcatctccgccggtgaatttcttcccgattttatttgcgtcggggtgggtgaggcggatgctgttcatatccatcaccacgacaaattcggttcctgtcgtatgctggacgtctaatgtataatcccggagctctttcagcccttttcttgtttgcaatgcccgcgcgacactcggtgtttccgcgaccagctttgcggtgcgcagcgcggtcgtccgttcttcttctttcacgcggtctgctgtttggacgctgatcgtgaaaaaggtgatacaaagtgcgataaggacgacaatacagacgaaaatcgttaatcgggtttgcaattttaatgtttttttcataacagccttccttacgtttatcattcccgcgttctactttactccgaaaaagccggtttgtgaagatcaggcccttatttcgtaaaagtgaggaaaaatggtattttttatcttgtcaatgtgttttaagtcctccataataagtgaggtagattacagaaagggactttttatatgaaaaatacttattggacgggttattttccgctcgttgcgattctgctatttagttcgtcattatccatttctacctcgctttatgtcatgaagatacttcagacgctcggcatgtatcaggggatgctggattatttctctgagaaagggatcagactggcgctttttgcagcgttcgcccttgtgtattttatgcttttttcggctttgaagctgattgcaaacacagtgacagagctgtctcttttgtttttcacaaatgaccctgaaggggacaatctgaaaaaaatcagattaggctctttaatttatgtaggcggaggaattctttcctttgcgctcgtgcagaatggtttttggattgcggcgttatttgccgttgttacgctcgtttatttgattttcatggtgtacagaatctattcgacactctcgatcgtttcgctgatcggttttatattgcttgagattctgttttggtttacttttgttatcggtattttgtacatctttatcaagctttataatagcataatggctagcttacctgtgtaagctagccatttttgttaagacagaaatctgtttttgatctcaggggaggggagcatgcatgcttccctttttccgaaccatttgtaacggcgccgggcgatgaaagaataggctctgtccctgagggggcggggcactgcgaaaaaaaccgctgacagccgccaggctccgcggagatgacgggaaacctttaacacggctgcggattttttgtatatccgcccgttttcgataaaaatcatgctgtcaaattgttctgtcggaagtccttctgatgccaaaagctcccgggcggtatctgattgcaatgaagcaaatgagattttgccggccggatcgcgtttaatgatgaattgaacggcgccgttgcataagttgcagacgccgtcaaacaaaagcacgcggtccggaagctgagctggtttcaaagcggatcccctccgttatctttaataagctgcctgcagcgtgtttttccagatcgaaagctgagggcttgcgtcatgaaggtattcgacgcttgacggtgtatcctttccgacccatacccccatcgtataagcgtccgtcaggccgacaaaccacatatcgtgatagtcatttgacgttcctgattttccgccgacgtacggagctttaaagttcgctttttttcctgttccgcttttgacgacggctttcatcatttctttgatctgcatgttggtccgcacgctgaatacctgcgtcggctcatctttccattttaatatcgtttttccttttaaatcagtcacttttgtaatcgcgtgactcggcgtataaacgccgttgttgccgaacgtggtgtacgcattggtcatttcaagcggagtcatgccgtttgtaaaaccgccaagcgccgcaggcagacggtaatccgcgctgaccagcttcgcgaaatgaaacggttcaaggtagctgaacgccttattgacgccgacgcggtccatgattctgatggccggtgtgttgtacgagtatttaaacgccgtttccagcgtgaccgtaccgtacgtgcggttattgtagttttgcgggcagtaatccgcactgcagaatttgcttgcgtcaatcttgctgtgtggcgttgcgccggtcttttcaatgtaaggtccgtaatcaagcagcggcttaatggatgaaccgggctgtctgtatgcctgataggcacggttgaaatcatatttatgataatctttcccgcctgaaagcgcgataatctgatgtgtctgatgattaatcacggccgctccgccctggacgcctgcatacggcagattttgattcacttgggcgacgacctggttttgcatatacggattcagcgccgtataaatcttcacgccgtcttttaacaatgtgctgactctgtctgaaagctcactctgtattttttgtttcgcctttccggaagctttttcaagacgtttgtcatagccttcggatgatgaaacaagctgtgtgaattcatcatttacataggaaacatagtcaggatatttatttgttttttcgtttatatcaagcttgatcttttccttttcggcttttttcagctgtttcccggatataacgcctgctttttttaatccgttaagcaatctgacttgtcgttttttcgtataatcaaaatgcttgagaggatcatataatgtagggttattagggatggcgcagataaaggccatttctcccaaagtgagagatttcagcggcttgctgaaataaaattgtgccgccgaaccgacaccgtatacgccgttattaaaataaatcgtatttaagtagccttctaaaatctcatctttgctgtatcttttctcaagctgataggaataggccagctccgtcagttttcggctgaaggtgcgttcatggcttaaatacacattccttgccagctgctgggtgatggtgctggcgccctgatcaattttatgatctttgaaattggaggcggccgccctgaccatccccataaagtcaaaccctttatgctcataaaaatgacggtcttcagaggttaaaaacagttgttttacctcattcggtattttattaaagggcacgatcacgcggttctcatgatcgctgacaatctcagaaacaaggcttccgtccctgtcatacatgtaactgttttgaaccaggttgatcgcttttaaatcaatatgtttatcgagcacctgatcaaaaggcttgatttgttttacctctttgccggaagcaataactgtaaatgcacacaacgggataatgccgagcagcaaaatccatccgattattttacgtaccatggtcactctcttttctcctgatttctagccatatcgtatcattcttttaagaatacgagaaggttaaatttagaagaaatcgtgatcgctgccggtcagcccgcatttgacgctgtatccttttgcagatgtcccgccatccataagagccccgcgcctattaaaaagagaaaggcggtgacgtagaaagcagccgaaatggaaaaaccgcttgagaccgcacctccgagcagagggccgagcacatttccgagaaaacgaaagctgacgttatagccgagcacctctccctggatgctgcccggcgccctgacgcggattgcggccgtaatgcaggggagcgtgccgcccatgaccatgccgaacagaaatctgaagactaacagaatggagagggaggaggcgagcgcctgcggaatgaaaaacaccgctgaggcaatcaaaagcacgattaagatccggctgtggccgaagcggtcgccgaagtccccccatttccgggcaagcagtaagcttccgagtccggtcgctgaaaacgccattccggagaaaaaagctaaattaacaggtccgtgcagctcattgacatataaagcgagcagcggctgaatgctgaaattgccggtctgcacgatcatagtaagcaccatcatcgcccaaagcgcgggctggtgaaaaatataagagagcacctgttttctggaataggttttccgtttgttttgtttctcgccgagcggctgctcattgacctgaaataaaacgagaagcacggacgcgaaaatgacaaaagacgtaataaaaaatgtgtacgtaaacccgaagctgtcagcgagcagcccgcccagcatcggtccgaataaagtgcctgacacctgacccatctgcagcgtgccgagcgtcttcccggcagtctctttcggcgtctgcgccgaaatcatggcaagcgatgtcggaacaaagcctgttactagacccataagcagccgcaggacaaacagctgataaacggatgtcacaaaccccatcaataaaatgctgacggcaatgccggttcctgtaatcaagagaatttttttgtagccgcgcttatcgccgaatcttccccaaaacggggaaatcacaaacgccattaaaaacgtgacgccgaacacatacccgctccatctctgcacatacccgcccgaatgggggctgatcgtttcgatatataacgaaagaaacggaacaatcatggtcatgctggcggaaataaagaaatttgtaatccaaatgacgacgaagttcttcttacggacagaaataacatcaccttctttacttttcgtgtatctaatcattagtatataggaatgaatccggtatttgtattttcgatgcggatataggaaaattcattatttttagaaaatgaagaaagtttcagaggggaaattgatatactatcataaaatatcatttttgatcggaggaaaggcaggtgtaaaaaaagtggatcagcgcagtctgctcattattgattttgaatttacaatgcctgacggaaaatacagcccgcaaaatttctttcccgagattattgaagcggggattgtcaagacagtgaatgatgaagtgactgaaacgttttcgagttatatcaaaccgaaaaaatttccgaagctgacgaaacgatgcaaaacctttctgaacatcacccaaaaagacgtggacggcggaatcacgtttaatgaattcatccgcaaattaaatgagcttgatcctgataaaaactgcacgatcgtcacctggggcaatatggatatgaaagtgttaaagcaaaattgcatgtttaaccacatcccttttccgttcaaaggagaacttcgggatctgtcccttgaatacaaaaatttcttcggcgacagaacattgaccggcctttggaaagcggcagaagagtatggcgataaagggacgggcacgcatcataaagcgctggatgatgcgcggacgacatacaaattattcaagcttgtcgagcgggataaacaatatcttgaaaaaccgaaacctccgacgatcggtgatcgcgtcgatctgactgaactgtttcgccgggccacataaaaaaacccaatcatgccgactgggtcaagttcttttaaaatagtcacgctctaacgcggccaagttgtcgagcgaacgttccgcccattctgagccgtccgctgtaagctgatctttcagccgggcagacgccgcttgtaaggaagccgtataatcaggcacctcgccatcaaacggtttgaccatctgatgcggtatgtttgtctgttccccgaatgcaagcgctcttctttcatgaaaaaacggaacatccgcctgcttcggatgatgaagatctccttgagcgggatgcgtcagaacggctttaattttcactaaatagtgattgggcctgacgtctgtcacttcccctatgtatgctcctgttttataaaacccttttacgattgtgccgatgtcaaacgtattcatagcgttcacctctctctagttattctataaaagatcaacgcggttggctagtgaacagctgccggaagcctgactgaggccgttgtgcccgagtgctcgccgctggtgaaacagacggagccttcatgatgctgaataatcgagaatgtcacggtaagcccgagcccggtgccgttcgttttcagcgtataatatggcttgccgagtttctgcagttcttcatcggacatgccgattccgttatccgtaatctgaatgagaatcatctcttcctgtttttggacggagacctcgattcggccgttttcagagggcacggcttcaatactgtttttaatcagattaatgaaggcctgtttcagtttttttacatcgccgaacacatataaatcaggctcgcttcgaaccgtaacggtcaccgatttaaaattggcataagactccattaaggaacctgtttcctttacgagcagagaaatatcaaacttttctttttcatagtcatcctgcttcgccatatcgagataattcgtaatgatcgtctgagcccggtcgagttcggacagcacaagtttctgatatccggagtgggatttgtcctgaagctgctcgccgctgaacagcagctgcacaaaacctctgacgaccgtaagcggattgcggacttcatgggcgacgcttgccgcaagctcgctgacgacggccattttttctgagtgaatcagccttgcccgcatggacgcattctcatcaatgatctcaatcaaataaatgcacagcaaaagggcgctgacttgaaaaaaaacagatactgccgcctcataataaacggaagatagattttgaaaattgaaaatattggtcgcggaatagatgaagacagatgcggttaataaggcggtttcagtgcagccgatgagaagagcgaaaagcagtttcttccgctttgaaaaaaaaggccatttcgtttggagctggatagggatgatgattaaaaaaggaattaaggataagaaaaaaagagcggaaggttcaaaccatatgagctgaaaaaaaacggatgccgcccctgcggcaagtcctgcggcggtaccggaataaagcaggcagacgataatgggaatcagctgcaaaccgtaacggacggaatgaagctcctggatgggaaaagccgtacataataaggaagatgacgctgcaaatacggcgaccagcaggcggttcgctctcggtacaagcaaatcgggcttgctgagccagaagacttgataaagaaaaatagggaataaaataaaagagaagtgaagcaggtaatcctttacaatctccatttatgcgaaatcctttcctatgtaaatatgaatctattataacatctttaccggaaaaaaaagtatatatttctctaaagcgaacgcccttatctcatctgataaaggcgttctttccgctgctaagcgagcgctgctttcattctctcaagcccttcttttacggcggcggctgaacagccgacattaagtctcataaatccttcgccgcccggtccgtattttgttcccggctctaatatgattttcccttttttgagcattctttctttgagctcggcatccgaaaatccgtattcgctgaaatccatccagatcaaataggaagcgtcaggcttcatcatgcggactttcggcaattcttttcttaaaaagtcctcagccaatttcatattcccttcaatgtaaggaatcagcgcgtcaagccaagggcctccctttgtataggccgcttcgattgctgcaaccgcaaatgtgttgaggctggaaatcccgttctgatgcaatgcggcggagaatttcgcccgcttataccgatcgggaatgataatggcggatgcctgaatcccggcaatattaaacgtcttgctcggcgcgacacaagtaacggaaatccgcgcaaactcctcagacagagaagcgaaaggcgtatgcggctttccgtacagcatcaagtcggaatgtatctcgtcagaaacgacggtgacgttatgggcggcgcacagcgatccgagcttcataagctcatcccggctccacgctctgccggacggattgtggggattacaaagaatcatcagcttgacctcagaatcgttcagctttttctcaagatcctcaaaatccatacagtagacgccgttttcttcccgtaacgggttatgtaaaacctgccgtttgttttccttgatcatctgataaaaaggcgtatacaccggtgattgaatcaacaccggatcgcccggttcggtaaaggcttgtacggccatgctgattgccgtgacaacaccgggactgaacgcgatgtttgcgggatcgggccggtagccgtgccgcgtctcaagccatgaagcgacggcttctcttgtgttttcgtcaggagacgtgtaaccgaatatgccgtggtcaaggcgggcttttaaggcgtcagtgaccgcttcgggagcgcggaaatccatatcggcaacccacatcggaagcgcatccgatacgccgaataacgcttccgccttgtcccatttcaccgattgtgtgccaagacggttttctcgaagatcaaagttcatgtatgtcactcctgtagtatcattattttgcacagcgtatctatgataaaatagaattgcaaactttattataagcggtgatgaaaatggaagaaagccaagcggtcatggaaatgatgaaaatcattgccaagtgggacccgtttaaatatggagaagatttttatgagacagaagccgtcgacatcgttcaggccgtctacagtgaagaccgtgccgacaagctggcagcagccattcaggatatctttgaagcttcatttgagcaaaagcttccgatcgaaggatgccaaaaggccgctgagcagcttctgttcataaaagaaagcagctcctgcaccccttaaaaaccggcggttccgccggtttttttattgaataaattcaaaaatccgctccgaaacaaactccgggcgctcttcaggtacgaggtgccccgtatccttgagtgaatacagaatggaatccggcaggtcgtcatgaagccgttttccgactgagaccggaacgacacggtcttcttctccccagattaaaagagcggggttttgcactttcttcaaatcctcgggctctaaatcgccctccctgtgtctgataaaccttgtcatcgctttgaaaatctggcggtctgtaaatggtttttcgtaaccgtcaatcatttcctgatcgataagcgtccggtcgtgaacgacatttaacaggttgttcagcacgccgtcttttgaaagccaatacttaagatacaggtcaaaacaagggagatgcgtcccgaatataatcgacgggtgcgagcgctttaaataccccgagctgcacagcaggacgattttagaaaaaagctcgggtctgagaagagacgcggataaggaaatctggccgcccattgaatggccgatgagtgcggcccggctgataccgagcttttccagaagtccgatcagaagcttggcgaggtttgcgtaagtatatacgaaagtccgtgacttttccgattgcccgaaaggaggcaggtcaacggcgataatatcataatggtttctgagcagcgggatcagttttctgaagctgaatgccgaagataaaaaaccgtgtacgcagacgagtgtctgtctgccgggattttcataatgctcgtaatacagctcaactccgtctatcgcggcccgtttaatcggtgaaacagcttccatgagagccttcgccgtcctttctttgttgtaatgtaaaggcttttttgattgtcagattttagctctggtttctttcgggtttttcttagcatttgtcgaaaatcgtgatataatgtcatgaagatttttgataatgcaaaggtgtgaaacgtatgaagctgaccgaaaaagaaacagaaatattagaaattttagacgaaaacagccgcgttgatgcggaaacgattgcgaaaatggcaaacattcccgctgaagaagtcaaaagcatcattgaaaagcttgaaaaggaaaaagtcatcattgattatgcggcgatgatcgactggcgcaaagtcgacggtttggaaggcgtcacggcgatgattgacgtaaaagtcactccgaaacgaaatgtcggctttgatgaagtcgctgagcggatatacagattccaggaagttgaatcagtgtacctgatgtcaggggtgtatgacttatctgtcgttattcgcggcaacacgatgtcagatgtggcaagcttcgtgtctgaaaaattgtccacccttgagtctgtcgtttccacgacaacgcacttcatcctgaaaaaatataagcatgacggcaaagtctttgaaagcggagacgatgacaaaagaatcgtggtgtctccgtaaatggaaacgaagacttcttatttatctgactacgtgcagcagattaaaccgtcaggcatccgcaaattctttgatctggccgctacgatggaaggcgtcatttcactgggagtgggagagcctgactttgtgacggcctggaacgtgagggaagcgagtattctttctttagaacagggttatacggcttatacggcaaatgcgggtctttatgaactgagagaagaaatcagccgctatttagatcagcggttcagcctgagttattcgcctgacagtgaactgatcgttactgtaggggcaagccaggcgcttgatctcgctgtccgcgccattatgaatcctggagaggaaatgttaattcccgaaccgtgttttgtcgcatatgaatcactcgtgacgctgacgggggcgaagccggtgccgattcagactgtcgctgcaaaaggtttcaaagcatcagcagccgattttgaagcggccctgacggacaaaacaaaagcgctgcttctatgctcgccgtcaaatccgacaggttccgtctattcgaaagaagagcttgaatccatcgctgctttcgctgaaaaacacgacttgatcgtgcttgccgatgaaatttatgccgaactgacgtatgacgagccattcacgagcatgggggccatcagcggcatgaaggaacgcacgattcttatttccggcttctccaaagcatttgccatgacggggtggagactcggatttacggcggcgcctcccgtgatcagggatgccatgctcaaaattcatcagcacgcgatgatgtgcgcgccttccatggctcagtatgcggcgcttgaagggctgaaaaacggtcaggaagacgtcgaaagaatgaagaaaagctaccggagacgccgaaacctgatcgtggagacattgaacgaaatcggactcggctgccaccaccccggcggagcattttacgcctttccttccattcagtcgaccggcatgagttcagaagaattcgcggaacagctgctcattgaagaaaaagtagccgtcgttccggggaatgtattcggcccgagcggcgaaggctacatcagatgttcctatgcgacatccattgagcagattcaggaagcgctcgtcagaatcaaacggtttgttgaaaaaagggcataaaaaaagatacgaacccggttcgcatccaaataaaaggggggaatactagaaagccttcgtaatcatagtataccctcctttatctgtgcttaaacatgattatgtaaaaaagttctctttgcgaaaaacaaacttgtatgatataattttaaattgcgtataatctgtatttaatttaacttaggagttgttatgaatggcagcaaaatttgaagtgggcagtgtttacactggtaaagtaacaggattacaagcgtatggtgcgtttgttgcattagatgaagaaactcaaggacttgttcacatttctgaagtcactcacggtttcgtaaaagacattaatgagcacctttctatcggtgacgaagtacaagtaaaagtacttgcggttgacgaagaaaaaggaaaaatcagcctttctatccgtgcgactcaagcggcgcctgaaagaaaagaaagcaaaccaagaaaaccgaaagcggctcaagcttctgaagaaacatctgctccgcaaggtttcaacacattgaaagataagcttgaagagtggattgaacagtccaaccgcaaagaccttatcaaaaaataatcattaaaaaaagcaccggatatgtatgttcggtgctttttttatgtttatctgacttccggatttgccgcttcctcgcgggatgtttcttcgttcggcttaaacagcaggccgagattgatcagaccggcgatgccgacaaggccgtaaataatccgcgacagagctgatccttggccgccgaagatggctgctactaaatcaaattggaaaaacccgatcagtccccagttaatagcgccgataatcgttaatacgagacagatacgctgaataacactcatgtaaacaacctcctctatgaattcgtgaaacagttatagattgtgacaaagcaaagaatctatgcatactacattctccgccgtgtaaatcacacactgtttcaagctgtacaagtgcctttcccgggaattcgatgtctgtaaaccatgtgatgcgccgtcaaaaaagcggattgctttacattgaacgtcatctttctgcataatataaatccaaaggaggagatgtcatgcaaaactttacatattggaatccgaccaagttgattttcggaaagggagaggttgaaaaacttcctgaagaaatcaaaccgtacggaaaaaacgtgctgctcgtatacggaggaggcagcattaagcgcagcggtctttatgatcaagtaaccgaactgctgaaaaaagcgggagttaccgtacatgaattggcaggcgtagagccgaatccgcgtgtctcaacggtgaacaaaggtgttgcgctctgtaaagaaaacagcatcgatttcttattggccgtcggcggcggaagtgtcattgactgcacgaaagccatcgcggcgggcgctaaatatgacggcgacgcgtgggatatcgtcacgaaaaaacaccagccgaaagaagcgctgcctttcggaacagtgctgacacttgcggcaaccggttcagagatgaactccggatcagtcatcacaaactgggagacacaagagaaatatggatgggggagcccgctcgtttaccctaaattctctattctcgatccggtaaacacatttaccgttccgaaagaccacaccatttacggcatggtcgatatgatgagccatgtgtttgaacaatatttccaccacacgtcaaacacgccgtatcaggaccggatgtgtgaatcgcttctgcgcacggtgattgaaacagcgccgaagctgatcaatgatctggagaactacgagcttcgtgagacgattttatatacaggcacgatcgcattaaacggaatgctgtcaatgggcgcaagaggggattgggccacacacaacatcgagcatgcggtatcagcggtttacgatataccgcacgccggaggtttagcgattctgttcccgaactggatgagacatgtgctcaaagaaaatccggcccgctttaaacagcttgccgtccgtgtcttcgatattgacgagacaggcaaatcagatgaagagatcgcacttgaaggaatcagcaggctgtctgatttctggacgagcctgggcgctccgaacagactcgctgattatgatatttctgatgagaagctggatacgattgcagataaagcgatggcaaacggagcattcggacagttcaagtcactgcagaaagaagacgtgcttgcgatactgaaagcatcattgtaataacataaagggggcggccggattggcagctcctttttttctgtgttatagtaattcccttacgatttttttggaggttatgataaatggagaactttacgtactacaatccgacgaaactgattttcggaaaaggtcaaatcgaccaattgaaaaaagagctgaagcaatacgggaaaaacgtgctgcttgtatacggaggcggcagcattaagcgtaacggcctgtatgaccaagtaacaggcatcttaaaagaagaaggcgcaaccgttcatgagcttgcgggcgttgaaccgaacccgcgtctggaaacggtaaataaaggaattgagctgtgcagaaagcatgagattgatttccttctcgcagtcggcggcggaagtgtcatcgactgtacaaaagcgattgcggccggtgcgaaatatgacggcgacgcatgggacatttacagcaaaaaagtaacggcgcaggacgcgctcccgttcggcacggtgctgacgcttgcggcgacaggctctgaaatgaaccctgattccgttatcacaaattgggaaacaaacgaaaaattcgtatggggcagcaatgtcactcatccgcgtttctccattttagatcctgagaatactttcagcgttccggaaaaccaaaccgtatacggcatggtggatatgatgagccacgtatttgaacaatacttccacaatgttgaaaacacgccgcttcaggacagaatgtgttttgcggtccttcagacggtaattgaaacagcgccgaaacttttggaagaccttgagaactataagcaccgtgaaacgattttatacgcgggtacgatcgcattaaacggcacgctgcaaatgggctatttcggcgattgggcttcccatacgatggagcacgccgtatcagcggtttatgacatccctcacgcgggaggacttgcgattctgttcccgaactggatgagatacacgctggatacaaatgtagaccgttttaaaaacctgatgctcaacatgtttgacattgatactgaaggcaaaacggataaagaaattgcgcttgaagggatcgataaattgtccgcgttctggacaagcctcggcgcaccgtcccgccttgcggattatgacatcggtgaagacaaacttgagctgatcgcagacatcgccgcaaaagaaatggaatacggcggattcggcaatttccaaaaactgaacaaagatgacgtacttgctatcttaaaggcgtcactgtaagatacatttccggccggggtgaagatgaaatagattttcaagctgcagatgtaaccgttttgggagtcccttcattagtgcatcaagagcaagtgaaacaccccttgccatgagacaactatggaaatctcacatgatgcggatttgactccctgtttctgtacatttagcagaaaaggatcaattaactttgcgattgccgatcatctatttacacaaaatctaaatcatgaagagccgcgaatttaaaaaaggagcgctgattcaatcagcgctccttttatgcattttgtgtactaagatcccgctgcgcccccatatagcttcccattaagttttgataaccgggaagatgactggagattaatgcgccaaaaccttcaacatcgttgcgccaatcacgctgtaactcgcatgctacgctgaaccagttcataagctgcgcgccgccatgagccatacgcgttaatgatgcatctgctacttgcttattaaacgtccccgaagcatctgtcacaacaaacacttcgtagcctgctttaatggcagaaagcgcaggaaaagcaacgcagacgtctgttaccacccccgcgataatcagctgttttttgccagtcgcctcaatggctttaacaaagtcttcattgtcccatgcattaatttgtccgggacgggctatttttggcgcatcgggaaagagatcaacgagttcttgcatgagcggtccgttgggtccattttcaaaactcgttgttaaaataaccggtaaatcaaagaatttagccgtatcaccgagagccaatacattgttcttaaattcatcaacgctatagtcacgcacgagaccggaaataaggccggtttgatggtcaactaaaagcacggcagcatcatcttttgaaagacgggaataaagatcagacattttatcatcctccttgaattaaggcaagtaagtttgtcaattgaaaacggtaaatctattcatatgctgtatagaaagaaagttatttctgaggtgacttttcgtgagggggatgatccttcaattaatttggaacgggaaccggagcatgatcaatccaatggataaactgttgtaaatagcgttgaagataacgttttgtttgttcatccgtcagtatgttttgagcggaatcaattttctcatggacttgcgaaatcagcattttttgaaagggcaaaacattgacttgcatagcttcgagtacttccctcatttgcgtttgaccaaaggcagtaccgaaccctccgggggttgctccaattaagccaaccggttttctgtttaaaacagaaggggtccgcggtctcgatgcccagtccaatgcattttttaatacccccggaattccgaaattgtactctggacttacaatgatgacgccgtcaacgtcttgtatatcagctctaaaggatgttacggagtctggtgctccggcaatttctaaatcttcgttaaaaaaaggaagactgtctatttcaacccaacgaaattgagccgcattatcgaaagtcaatcaatgattgagcaattgctcgattatacgagttttttcgtaaacttccacaaataagaccaatggttttagtcataaaatcacctcccggtttaaaatcactttcatcttaacacgataccccaaatatagacactatttttaaaaatggacatttatgccttaatattccttcgtggcagcctctcaagaggagtactatataaaaagaaccggcccatcgggattggcgatggatgtcatcctgctccaaagtaaaggtgatacgttcctggatcaccaacattcgattcgttatccctctcacgattattacaaatataaccatatcgaatccggggtattgtataaaaaatgaatgcatttttagcgcaaatcccatattcatcatgccttcttcatgacttgatttagcgggtgagttcatataaagtgaaagagaaaacaattcaccgtgatggagggataagcaaatgacgcatgtacgctttgattactcaagagcgttaccttttttcaatgaacatgaacttacatacgcacgtgatttcgtaaaaacggcacaccataatatccatgaaaaaacaggcgccggaagcgactttttaggatgggtggacctccctgaaaactacgataaagaagaattcgcgcgcattaaaaaaagcgctgaaaaaatcaaatcagattcagacgtgcttctcgtcgtgggtatcggcggttcatacttaggcgcccgcgcggcgattgaagcgctcaatcattctttctataacgttctgccgaaagacaagcgcaaaaaccctcaagttatctttatcggcaacaatatcagctcaacttatatgaaagatgttatggatcttttggaagacgctgatttctctatcaatgtcatttctaaatcaggcacgacgacggaacctgcaatcgctttccggattttccgcaaacttcttgaagaaaaatacggaaaagaagaagcgaaagcgcggatttacgcgacgacagataaagagcgcggcgctttaaaaacgctttctaatgaagaaggcttcgaatcattcgttattcctgatgatgtcggcggacgtttctccgttctgactgcggtaggtcttctgccgattgcggtaagcggggctgatatcgatgaaatgatgaaaggcgctcttgatgcaagcaaagacttttccagctcggaattagaagagaacgcggcttaccaatacgccgtcgtccgcaacgttctgtataataaaggcagaaccattgaaatgcttatcaactatgagcctgcgctgcaatactttgcggaatggtggaagcagctcttcggcgaaagtgaaggaaaagatgaaaaaggcatctatccttcttccgctaacttctcaacagaccttcactctctcggtcaatacgtgcaggaaggcagacgcgatctgtttgaaactgtattaaacgttgaaaaaccgaagcatgagctgacaattgaagaagcggaaaatgatctcgacggcttaaattacttagccggcaaaacggtcgatttcgtcaacaaaaaagcgttcgaaggcacgatgcttgcccatacagacggaaaagtgccgaacttaattgtcaatattccggagcttaatgcatatacatttggatatctcgtctatttctttgaaaaagcggtggcgatgagcggttatctgctcggagtcaacccgtttgatcagcctggtgttgaagcctataaggtgaatatgttcgcgcttctcggcaaaccgggctttgaagagaaaaaagcagagcttgaaaaacgccttgaaaaataaaaagaaaggctggccctcagcatgacgggtcagccttttttaaaccgtgaaaggtgtgatgatgaatgatacgactcttatgtaagcatgccgtcatttccgtctgttccgccgctattgtctattcggcactaaaactgtctcctgaatccctcttacaaaccatcctgtttttcgctttccctctcggcttgtttacggacatggtccggctgaaactgaagattggccggatgcagtcgctgatcacgaagtgctgtctctatgccgccgttttctatatttcaacggaagccgttctctccgcaattgtgacgtatgttctgattgaatgcgccgttacctctttccagcgtctgtctgccgctcccgattcttcccgggcgccgtatgaagatgccgcagagcggggacgctaaagacaaaaaggagcatatgcacatgatcagcattccatcttcacttgaagggcaatcgtttttactccgcgaactggaacaggtgctgaaaccgatcggttataccatcggaggcggctgggagtatgaccgcgggttctttgattacaaaatttccgatcaggacggctatttatttctccgcatccctgttgaagcaaataagggacacctggatgaacggggggccgccgttacaatcggcaccccctttttgctgaggcacgtctatcaggaggaaacggatgatcacgcaggcggcggtgtttttgagtcattattcaaccaattctccgagccgaaacggcgggatgcggcaattgaccgctcatatacagatatcgggatctcgcttgtaaaagagctggaagacgtcctgctgcattaaagagccaaaaacagatcagtatcgagcacctggtatgacaggggaggggtcagcatcggcccctcttctttttgtatgccgatgatcgtggtattccgtttgagataatagagcgcacagtcatgataagatgaaccctttaaatcctcggggacgggaatgatgcgcacctttttctccagcgtcagatctgacagcgtttgcggtttggcaagctgcagcttgacccggtaatgctcaaacatcacccggctcgacaggcgtgatgtgcacagaatcttattggctcctgcgcgctcggcgtttttgacataccgttccgttaaaatttccacgatacaataaacggacggatgcagccctttgatggcgagaagcgttaataccgacagcatatcagcttcggattcatttttctgctggtctgctgtcaaaatgacggtatcggcttccgtaatattcgccttattgagcgtactgtcatcagcggcatgtccgcggatgaaatggacgttttcaataagcggcccttcccttaatgaatcatcaatcaggacgacagtttttgacggcgcgatgtgctgcagttctttcagcagcatatgcgacttctcattccatccgataagaatgacgtgccccttgcctttaaaggcgaccttcccttcgacatagcgatgctgtttgctgaacacggctgaagaaagcgtggcgaaataggcggttacaaaactcgctccgcttaatacaagcaccatgccggcaatctgcccgagcggcgtctggggcacgtaatcgccgtagccgactgtggccaccgtaataaccgcccaccaaaccccttcaaacacagacgtgaattgcttcggctcaagcatgtaaatgagttggccgaacaataaaatcaaggcgataatgatcagtccgatccgaacatataacggccatctcagccaggaaataaataaacggtttgatttcattcgcccggctcttctttcgacagagagatggataaaatctgcttaataatggtgtttagtttttcgttcagctgttgctggccgtatgagtcacgcgcatgtctgattaaatcggccgtctcatcttcaaactgaatgagaggttcgtcgttttccgattcattatagagctggataaaggcgtcaagcccctcgttcattctgtctatcgcattgctcagctgttctttctcgccatttgtcactttcatgtcgatcacacctgtatcttttttatacagtatgtcccagttcgtttgatgtctttcaaaaatcgccgaaaacatattcaccctcattttttcatatgataaagaaagcggaccgaaaaagggtgagtcaaatgacagtcattcaaaaactgctggcggcgctggccggagcgcagctgctcgcttcggcggccgtattgcttattttcgatttgaatggatacaatcatatgtccggcggattttcatggcttgtttttgcaaaagagaccgcaggcacgtttccgttttacatcggattggccgggtgtatcctcatcatgctcggaggattgattcctgtcagaaaaaagaagcggatttctgtacaggaaagcggacaatcattaaaataatatataagcagatcgtacgatataagagaaaaaggaagaggataatatgctgtttatctttttaacaattgctgcattgggattgtcgttttgggcacaatttaaagtgaaaagcaattttcagaaatactcagacgtagaagcttccagtcagcggacgggggcggaaacggcaagacggattcttgatattaacggtttatatgatgtgccggtagaaccggtaagaggcactttaacagaccattacgacccgacggagcgggtggtgcgtttatctgagccggtatattacggccgctccatttccgccatttccgtcgcttcccatgaagtcggacatgctttgcagcatcaggaatcatacggcgcgcttgtgctgaggcacaaaatttttccggtcgtcaattttgcctccggggttgcccctctgcttttcttgggcgggatgctcctgggcagcttgaacttaatcggactcggcattattttgttttcggccgctgtttttttccagcttgtcacactgcctgtcgagtttaatgccagcgcgagggcgaagcggattatcgtgtcggaaggattcattcgcaacagtgaagaacacggcgtgaataaagtgctgaacgccgccgcgctgacgtatgtggctgcggcgctcgtttcattattcgagctgcttcgttttgtgatgattttcttaaatggtcgtgatgagaattaacacgaaggaggtggccccttaccgtttgcggtaggggtttttttgcttatattaaaactgattctcattatgctgttaatcggattaacggccatctttgtcgctgcggaatttgcgattgtcaaaatccgcggttcaaaaattgcggagctggttgaaaccggagacagccgggcgctcgcggcgcacagggtgatttcaaatctcgatgaatatttatcagcgtgccagctcggcattacgattacggcgctcggactcggctggctcggtgaaccgacgattcagcggcttcttcatcctgttttcagcctgatcggaatgccgtcatccattacgcacgtcgtcacgtttattgcggcgtttatcgccgtcacgtatctgcacgttgttatcggagagcttgcgccgaaaacgatatccattcaaaaagccgaagccgtcagtctgtggacggcgaaaccgctcattctgttttataaagtgatgtatccgtttattaagctgttaaacggttcagccggatttttggtcaagctgttcggttttcattcggtgaaagaacatgaggtcgtggtcagtgaagaagaattgcggctgattttgtctgaaagctataaaaaaggtcaaatcaatcaatctgaattccgttacgtcaataaaatatttgaattcgataaccgggtcgccagagaaatcatggtgccgcgcaccgaaatcgccgtcatctcgcttgaacagtcagttgatgaagccatacatttgatcatcaacgaacggtatacgcgatatccggttattaaggaagacaaagatcacattctcggcattattaacaataaggatttatttaaggcgtattttctcggccgctccattgaattaaaagaaattatgcgtccggtcatcagagtcattgaaagcatccccgttcaggagcttttgatccgcatgcagaaggagcggattcatatggcgattctcgttgacgaatacggcggcacggcgggacttgtgaccgtcgaagacatattggaggaaatcgtcggggaaatccgtgatgaatatgaccaggatgaaatgccccacatcgtcaaaaaaggcgaacaccactatgtgatggacggcaaggcgctcatagaagaggtgaatgatctccttgatatcgccatcgaaaatgaagacattgacacgattgccggctggctcttaacacaaaaaatggagctgaaaaatggtgatgtgtttcatgccgaagggtgtgaatttaaggtgctggaagcggaagaccatcatatccgcttcgttgaaattaaaaaaactgatttctgagcctcctgcttttgcaatgaggctttttttatggaaaaaatgcttcttcgtcccgctccttcatatgctgtaaagaaaggagtgtcggtatgaaaacggattggtggaaaacggcggccgtctatcaaatttatccccgaagctttatggattcgaacggggacggaatcggcgacatgaacggcatcagagcaaaacttcgttacataaaagagttgggggcggatgtgatctggctttgtcccgtttttgactcgccgggcgcggacaacggctacgatattcggaattataaacaaattgccggcgaattcgggacgatggaggattttgaccggctccttgcggatgtccatgcgctcggcatgaagctgattatagacctcgtcatcaaccatacaagcgatgagcacccttggtttatcgaatcacgctcggcgaaagattccgaaaaacgggactggtacatctggagagacggaaaaaacggcaaagagccgaacaattgggaaagcattttcggcggatcagcgtgggaatatgatcaagagaccggccagtattacctgcacctgtttgacaaaaaacagcctgatttaaattgggaaaacgaagcgatgaggcagtccgtttatgagatggtccgctggtggcttgataaaggcatagacggcttccgggtggatgccatttctcacattaagaaaaaagaagggctccctgacatgccgaacccggacggtctcccgtacgtcccgtctttcccgtatcatatgaatggggaaggcataatggatctcttaagagagctgaaacgggaaacattttcgcgctatccgatcatgacggtcggcgaggcgaacggagtggcggcttgggaggcggctgattgggccggtgaagaacacggcgtctttcaaatgatttttcaatttgaacatctcggcctctgggatacggaagatgatcaaagcatctccattccggcgcttaagcgcgtcttgtctggctggcagaacagtcttgaaggaaagggctggaacgcgttatttatggagaaccacgatcagccccgttccgtctcggtatggggtgacgaacgttttttgacagaaagcgccaaggcactcgccgcgatgtatatgctgatgaaaggcacgccgtttatttaccaggggcaggagctcgggatgaccaatgtttcgtttccatccattgaagattatgatgacgccgcaatgaaatatctgtatgaaaaagagacgtcccgcggcgttccgcatgaaaaagtgatgaagatcatctggaagaagggccgggataattcacggacaccgatgcaatggagcggtgaggcgaacggcgggttttctgatgcttctccgtggctcggagtgaatccgaaccacacatggctgaacgctgcatcacaaatgcaggatgaaacatccgtataccatttctacagacggctgctcgccctcagaaaagaacacagcgtattgatcagcggcacatatgaattgctgcttccgaatgaccggcagatttatgcctatctaagaaaaaacggaacaaaaaccgccctgatcatcacaaatctgtctaaaacccccgctttatacaagcatcccggctatccgcttgactccgatacgctcgtgctcgcaagcatggaaacaccaccgcatcggcatgtgacatcctttcttttaaagccttatgaggcccgcgtatatatatggtgaaaaacttcagtcccgaggctgaagttttttgtgatctgcgtttatcatcgcgatccgacaggaaaagacaaatacagaaacgaatatgggaaaggaagagaaaaagaaaggaggcatctatatgctgaaaaaattgcagattcaaacaaacagacgggatgaaatgatcgacatcacacatgaagctgaagcgtttctccgcaaaacaggcgtgaaaaacggcttggcgctcatatactgtccccatacaaccgccggcattaccataaatgaaaatgccgatccggatgtgaagagggatatgctcagaaggtttgatgaaatgtatccgtgggagcacgaactggaccggcatatggagggaaatacggcggcgcatatgaaagcgagtacaaccggcgcctcccagcatgtcatcatagaagacgggcgcctgatactcggaacatggcagggcgtttatttttgcgaatttgacggtccgcgaaacagaacatgttatatcaaaatacaggctgaatcggaggaaaacacaaatgagtgagtggatgagtgcattatcattaacaaagcccgtcattcaggcaccgatggccggcgggctggtcacgccgcgtctggcttcggcggtatcaaatgaaggggcgctcggaagcctcgcttcaggatacgtcagcccgcaagcgcttgaaaaacagcttatcgagatgaaagagctgacgaaccgctcctatcaagtaaatcttttcgttccggaagaaaggcagatgcctgaggcggaactggttgaaaaatggaaagcccgcatcccgagggcaaaagacgccaagccgttctctgatctgaaagaagaatggaatgatttcgaggaaaaagcggagcttctgatccgttacggagtcaaagcgtgttcattcaccttcggcctgccgccggaagaaacggcggaaaagctgaagaaaagcggatgtttccttttcggcacggcgacaacgccggaggaagcgaaggtctttgaagaacgggggatggacgccgttatccttcagggaatagaagccggcgggcatcgcgggtcgtttctgccggttaaaggagaaccggctctcggccttatggcgctgattccgcaggctaaagacgcgctgaatatcccggtgattgcggcaggcggcatttttgaccgccgcggcgtgcaggccgcccgctgtttgggtgcggacggcgttcaagtaggaacaccgtttctcctttgtgaagaaagcagcgcctcaccgggatatcaaaaagccattgccgattcaaaaggagccgacacgcggctgaccaccctgttttcgggaaaacaggcgcggggaatcgtgaatcagttcatgaaaacatatgaggctgacgagggaaatacgctgccttatccgctgcataatacgctgacaaagccgatgcgcgggcacgcggctcaatcaggagacgcggagtatatgtctttatgggccggccagtccgccgcgaaacttgaagggccgacagacgtgaaaaccgttttggaagaattgtgcgaatcataatccagaaatcgtgaggtgatggatgatgaagattcttcaaatgtcctataaaaaaagagggactattgagtttgtctttgaagattttccgcattctaaagtcaccatggcgccgattaaagggtattactttgtccgcgccattaaatggagccgacgggacagagccgtcacccgacatgatttagagaagtttgaatgggctgcaaaccaagcgctcggcacgacggctttttaccggaaaagaaaagcattccgcatcccatcgtcacaatgacagacgatgggattgttttaatgcatgatctgataaagcgcgggtgcatcaagccttgttgcctggttaagcagataagccggctgcacggcatttttttttcttaaagaattcaatctctggatgatttgttcagcggtcagaatcccgagaccgtgggcgaaatattgatcattccccatcacaatgacattctctccccgccactgagcctttgcaggattaaaatcaggatttttaaaatataaacaatctccccgtaaaaagtggctgccggtttccgtgtagatcggcagatgctcatagtgccagtcatacaaagtgatatcccggaaacgccggttaaaccgttcttcaccgattgtctttaagacggccagataataaatcacaacaatggcggtagcgcattcaaatgcgtaaaacgccccgttttcaataatgtcccgaatcgcttttgaagcggggattctgtacttcagctccaaggctccttccggcgtcactctccaataagccgtatttccgtatgttttggcgaaagttgcaaatttcacacctgatccgtgcagttctcttgcggcttccacaatatggcggcgcagccgcacctcgaacatcagttcagcaatcgacccgtaatcgaattgtacgggagaattgagcagttcatttatatacggaacaaggcttttttccgtctgccagttcgcgatgtcctgaggccgaagcacttggccggatatgataatcatctgcgcgccccctatctttttttataagatatgcaggaagcttgggcaatgaaaatcaagtcataaaaaaggaggaaatgttaacaaaatgtgaagactgagccgatatataaggtatcacacttgagggagcagcttaatatgaaaaaattcattaattggtgcacaaaggcatcgatttcacgtaaattaatcatttcatttatcgtgatcttaatcataccgattctcgtgttagaattcagttcataccatacggcgagcaattcgctggatgatcagatttcaggcaacgcgaaaaataacatcgaatcttttaacacaaccattacaaatgatatcggctcaaaagcaaaggcgattgaatttttcagtgaaacgttaaaaggatcatccttctcaaagaaaaacatgtctgctcttgaagaaaagttcgggcaatacacgtctattcataaggacgtagcccgcgtttacggaggaaccgaagacggcagctacgcacaggcgccgaaggagaatactccggccgattacgatccgagaacacgcacttggtataaagacgctgtgaaggccggcggcacgctcgttgtcaccgacccttacaccgcggcaagcgacggcagcatggtcgttaccgtggcaaagcagatgcaggacggaacaggcgtagtggccatggatattacgattgaccagctgctgaagcagatgcagggaatcaaaatcggacaaaaaggattcgtgtttatcacgtccaaaaataaaacctatgtcgcgcataaagaccacaaaccgggcgacaaagtttcaaccccgtggctgaatgaggtatacagcaaagacagcggcattatttcatacaagctcgatgatcaaaataaaaaaatggcgtttacgacaaataaactgaccggatggaaaatagaggggggcatggagctcaacgaaattaaagacgcctcacaaccggtgctgacgatgggaatgatcgtccttgcagcatccattatcatcgggggaattttaattctgttgattgtcagatccattacgtcaccgctgaaacggcttgtccgctcttctaaacaaatcagcggcggagacttgactgaaaccattgatatccgctcgaaagatgaattgggcgaactcggcgcgagctttaatgaaatgggagaatctctgcgcggactgatcagcgcgattcaaaactctgtcgacaacgtggccgcgtcatcggaggagctgaccgcttcagcttcgcagacaagcaaagcgacggaacatattacaatggccattgagcagttttcaaacggaaacgaagagcaaagcgaaaaagtcgattcaagctcagccaagctgaatcatataaatgacggactcaccgccgtttcccgcacatcatcatccattacggaagcatctaaacaatcgaaggaagctgccggcaccggggaagaatatgtgcagcaaaccgtcgggcagatgaatctcatcaatcaatcggtccagcaggcggaagcggttgtaaaaggccttgaggccaaatcaaaagacatcactcatattttaagagtcatcaacggtattgccgatcagacaaacctgcttgctttaaatgcagccattgaagcggcaagagccggtgaatacgggcggggcttctcagtggtagccgaagaagtgcgcaagcttgccgtccaatccgccggttctgccaaagagattgaaaaactcattcaggaaattacggctgagattaatacatcacttcacatgttcacatccgttaatgaagaagttcaatcaggacttgccgtgacggaccgcacgaaagaaagcttccagaatatcttcggcatgacaaacgatatcgccgagaagcttcaatcgatgaacggcacggttgaacagctgtcagacagctcccagcacgtttcagccgcagtgacggatattgcggacgtatctagggaaagcgcagcaagcattcaggatattgccgcatccgcagaagaacagcttgcatcaatggaagaaatcagcacatccgccgatactttggcgcaaatggccgaagaactgcgggaattaacgaaacaatttaaaatcaactagtaaaaaaggacgctttccggatggaaggcgtccttttttatagtgacagccggataattgaataaaaagtcttgcatacaaagggagtacatagaactatttttcatttatgacttaattttcaatgtaataaaaagggagtcggccgatataaacagtaaatgattgaaagaggtttacaaaattgaaaaaaacagcaaaaaaaatcgccagaaaatcaatagccaaaaaactgatcatttcatttttactgatcttaatcattccggtagcagtattggctgccggcgcctaccgttcggcggcttcatccgttgaaaagcaaatgatggaaagcgccgaaggaaatgtgcaaatcttaaacaatatgattgatgaccggatcggaatgtttacaaaaagctctgcatatttcagcgaatgggcgacaagcgctaaatttaaagaaaaaaaccaaacggaaatgcaagaaaggttcaagcagtttattgaaagcaatgataaagcgtccgccgtattttcaagcagcaaggaaggaacgtttacccgttatccgcatgccgatatgccggccgatttcaatccgcttgaaagaagctggtatcaggaagccatggagaataaaggccaaaccatcatcacagacccttatgagtccatctcaaacaaaaagatggtcgtcaccatggcccgcgcggcgcaagacggatcaggcgtcgtcgccattgatataaaaatcgacgatctcatcacgatgacaaaagaagtgaacatcggaaaagaaggatatgcctttatcctcagcaaaaataaaaaagccgttgcctacagtgatgaaaaagccggctcggcggtatcgggaaaatgggttgatacattattcagcgggcaaaaaggcgactttgaatatacgctgaacgggaaagcgaaaaaaatggcgtacgtgaccaatgaagcgacgggctggaagatcagcggaaccatgtccgtggatgaaatcaaggatgcggcaagaccggttctgactctggccgttatcatattggcgatagccattgccgcagggatgattttcatttattttgtcatccgctcaattaccaaaccgttaaaacgtctcgtagcttcagcggaaaaaatcagcagcggagatctgacggaaaccattgatgtcagctctcaagatgagctgggcgtgctcggtaaaagttttaatcatatgacagattcactccgttcgcttattcagggaattcaggactctgttgaacatgtcgcttcttcctcagaggagctgacggcttcggctgagcagacgagcaaagcaacggaacatatcacccttgcgattgaacagttttctaatggaacggaagaccaaagtgagagtattgataaagcgacagcccaagtgaatgagatgaaagacgggctcagcgatctggcggaagcggcagccgtggtgacggaaacgtcaattgaatcggcggagatatccggcgccggtgagcggcttgtcaagaaaacagcgggccagatgggcgccattgaccaatccgtaagtaaagcggagcaagtcgtacaagggcttgaactcaaatcgcaggacattaccagcattttgcgcgtcattaacggcattgccgatcaaacgaatctccttgctttaaatgcagccattgaagcggcaagagcgggagaatacggacgcggtttttcagtcgttgccgaagaagtgagaaagcttgccgtacaatccgccgattcagcgaaagaaatcgaatccttaattcatgaaatcgtcaaagaaattcatacttcgctcggaatgctggaatccgtcaatcacgaggtgaaaagcggacttcagttaacggacgaaacggaaaaaagcttccgggacatttccgttaaaacaaatcagattgccggtgaactgcaaaatatgaatgcaaccgtggaacagctttctgccgggtctcaggaagtatcaaacgcttcagaggatatcgcggccgtctccagacaaagcgcggccggcattcaggacatcgcggcttcagctgaagagcagcttgcgtccatggaggaaatcagttcctccgccgtcacgctggaaaaaatggcggaagaattacgcgaactgacaaagcgttttaagataaactcttaattaagtctaaaagactaattttaagacaggtaaaaagtatgtttcgttatatttcttctttttggatgtgtataattacccataattgccgatatgaagggtaaacacgcaagaggagatatagcagatgaaaaaaattgtgcaaatcatcaagcagagatcgcttacaagaaaactgctcatttcttttttggccattctcattcttcctatttcaacgctggcttttatcgcctatcaatcggcggtaagcacgcttgacaggcagatgatgggaagcgcactagataatgtgcagcagattaacgatatgatcaacacaagcatcagccaaaaggaagacggaacggcatatttcagcgactggctcacaaaggatcggtacaagccgaaaaaccaatcgcaaattaccgataaattcacagagtacatgaagatcaataaagacgtggaatccatttatacgagtgacacggaaggacatttcacacggtatccggatctgcagatgcctaaaggatataatccgcttgaaagagactggtataaaaaggccgtggaaaataaggggaaagttgttgtaacagatccttaccgcacggcttccaccaatacgatggtcgtgacggtcgttcagcagacgaaagacggctcaggagtcgtcgccatcaatatgaaaatcgatgagcttctgaaaacgacaaagaaagtgaacatcggaaaatcaggctacgcttttatcctgacgaaagacaaaaaagtggtcgcccacccgaaccgcacgtcaggcacagtattaaacggggagtgggctgaacagctgttcaccagcaaaaaaggtgattttcaatacaaatacgacggccaggaaaagaaaatggcttatgatacaaacgggctgacaggctggaagattaccggaacgatgtatctggacgaaattcatgaagcggccctgccgatccttcatctgtccctgctcgttctcgtattagcgattgtgatcggaaccatcgtcatggtgctgattatccgttcaatcacaaaaccgctcaagcagcttgtgacatcatcgaaacagatcagtgaaggcgacttaacagaaacgatcgagattcagtcaaaagatgaattaggcgagcttggcaaaagctttaacaatatggccgcttcactcaggtctctcatccatgccatccaggattccgtgaataacgtcgcatcttcctcagaggagctgacggcttcagcggagcagacaagcaaggcaaccgaacatatcacactggcgatcgaacaattttctaacggaaatgaaagccaaagtgaaaacattgaaagcgcggcggaacatatttaccaaatgaacagcgggcttaaagatatggcgaaagcatctgccgtcattaccgaatcctccgccacatcagcggaagtcgccaattcaggcggaaagctcgtccaccagacggtcggccaaatgaacgtcattgaccggtcagtgaaagaagctgaacaagtggtgcgcggacttgaaacaaaatcaaaagacattacaaacattctccgtgtcattaacggaatcgctgaccagacaaaccttcttgcgctgaacgcggcaattgaagccgcacgtgcgggtgaatacgggcggggcttctcagtcgtcgccgaagaggtcagaaaacttgcggtccagtctgccgattcagcgaaagaaatcgaaagcttaatcatagaaatcgtcaacgaaatcaatacatctctcggcatgttccaatccgtcaacaaagaggtggagagcggactggatattacgaatcagaccgaaacgagcttcaaacggatttctgaaatgacgaaccagatcgccggagaaattcaaaatatgaatgcgacggtagaacagctgacagcaggctctcagcagatttcaggagcttctgagcaaatcgcgtccatcgcaaaagaaagctccgccagcattcaggatattgcggcctccgccgaagaacagctggcttcaatggaagaaatcagttcgtcttcggaaacgttatcccaaatggcggaagaattacgtgatatgacgaaacgatttaaaatagattaataggtcatagaacacccaaatgtgctgtttgggtgttttttttagtttttttaataaatcttttgtcctatctgacgatattagatttagcttttcaaagaaggagactgaaaaaatgaaacaactgatacattggatcaaacagccatccatcagcaagccgctgatcgcggcatttttagccgtattggtgcttccggtcggcatactcgcctacttcagctaccaaacggcggggagtacattagaaagcgaactgacccacagcgcccagggaaatgtcagtgaactgaacagcgtgctggaaaacatgcttgagggtaagctgaaagcgattgactacttcagcgaatcaatcacaaaggaaaaactgaacacaaaaaataaatcggtactgcttgacaacatgaagcagtatgtcaccgtaaatgacgatgtcgcgtcaatttacgccgcgtctcgcgacaaagcgttcgtgaaatatccgtccgttgatatgccgtccgattataatccgctcacgcgcgagtggtataccaaagcggttgaaaaaagcggacagccggtgtttaccgagccctataaagacgctgcaaccggacagacggttgttacgattgcccagcagacaaaagacggatcaggcgttgtggcgcttgatattaatcttggcgacctgctgaacgcttccgaacgcgtccagatcggtcataaaggttttgccttcattacaacgggagataaaaaatacatcgcgcatccgactataaaagcgggaacggaaggctccggagagtggacggaagaagtattttccaaatcaagcggatcgtttgaatacatgtttgaaggacagcagaagaaaatggccttcacgacaaacaaactgacgggctggaaaatcgccggcacattttttgtcagtgagatccatgacgcagcctcgcctgtcatgaaaatggcgctgatcatcctggcggtttctcttatcgtcggcggtattttaatcgtttttatcattcgctcgattgcaaaaccgctcaaaaaacttgtttcgacatcagctaaaatcagtgacggcgatttaacggaagtcattgacatcaagtcgaaaaatgaattcgggcagctcagccaaagcttcaatgagatgtcggcgtcactccggtctgtcatcggcgtcatccagtcatccgtcgaacatgtcgcttcttcatccgaagagctgacggcatccgccggacagacaagcaaggcgacagagcatattacactggcgattgaacaattctcaaacggaaacgaatcacaaagcgagaaattggaagaaagtgctgatcacctttcccaaatgaatgcgggcattgccgagacggcgaatgtatcggcggaaatcactgaatccgccatccaaacctctgaaacggccggaagcggagaagaattagtggcgaaaacggtcggccagatgaaaacaattgatcgttccgtacagcaggcggaagcggtcgtaaaagggctggaaacgaagtcgcacgacattaagagcatcctcaacgtcattaacggcattgccgatcaaacaaatctgcttgccttaaacgctgccattgaagcggccagagcaggcgaatacgggcggggcttctccgtcgttgcggaagaagtgagaaagcttgccgtacaatcagccggctccgcgaaggaaatcgaaacgctgattcaggaaatcgtcaaagaaatcgccacatcgctttccgtattccaagcggtgaatcaagatgtgaaggaaggcctcgatattacggatcagacggccgaaagcttcaaaaaaatctcagaaatgacgactcagatttcaggcgccttgcagcatatgaacggaacgcttgagaagcttgcagccgggtcgcaaaatgtgacaaacgcggtggaggacattacctcagtcgccaaagaagggtccgccggcattcaagacatcgccgcctcagctgaagagcagctggcctccatggaagaaatcagttcatccgccgaaacgcttgcgcatatggctgaagaactgcagcaggtcacacggaaatttacgattcagtctgaagacgaagaacagctgtagcgagctgtttcttttcctcattttaaaaaagcgatacactagtataaaagaagggagtggcagtgatgagattagaaggcaaaaaagtcatagcgcttgtcagtgacgattttgaagacttagagctttggtatcccgtctaccggctgagagaggaaggcgcgatcgttcatttaataggagaagaagcgggccgttcatacaaaggaaaatacggcgtgcccgcgacggcggattacgattttaagagcctgattattcaggagtatgacgccgtgctcgtgcctggcggctgggctcctgacaaactgcgaagatatcccgaagttttggacatcatccgtacgatgaacgagcagaaaaagccgatcggccagatctgccatgcgggctgggtgctcatatctgccggaattctcgcaggaaaaaaagtaacgagcacgcccggcatcaaagacgacatgacaaatgcaggggcacagtggctggatgaagctgtcgtaactgacggacacattgtatcaagccgccgcccgcccgaccttccgcagtatgcaaaagcgtttgctgacctgttagcgtccaaataaaaaacatccgcccgaatccgggcggatgtttttagttttgatcggcgggaaagacaattccgatttgttttctcgcttcttccataatgcttgccgtaatgaaagaacgttcaaatgtattttcggaagactcccgctgtccgtttcgaagaagattgatgaattcagccgtttcgtagtacatcgacggtttcagatcagggactgaaatgtcttccgtccggccgtcacgatagcggatttccgcccgttccggtccgtgaatgctgtccagaacgatcgtgccgtcttcaccctgaatttccgccggggcaaacgaatttgagattttcgaatgcatcagcaccgcttcaaatccgtcgtatgacagaatcaccgtgccttcgccgtcaacgccggatgctagtttatgaccggtcgcaatgacgtttttcggtttgccgaacaggacgacggccggataaatgcagtacacgccgatgtccattaacgaaccgttcgataattcaggcttaaacgcgtttagcaccgtaccgttcttatatgcatcatatcgtgatgaatattggcagtagcttgctgtgaatctcctgacgggtccgattttatgtaagtggttttgaagcatgctgaagttcggcaggaacgttgttttcatggcttccatcaagagaacgccgttcgttttggctgcgtgaatcatttcatccgtttcccttgcgttagacgcaaacggtttttcgcacagtacatgcttgccgtgttccataaaaaggaccgcctgctctttgtgaaatgcattcgggctggcgagatacaccgcgtcataggctttgctttccgccatttctttcaggctggtgaaataatgagcagcgccgtgtttgccggcgaattccgccgcgcgttcctcagttctggaataaaccgccgttaattgaaaatcatcaatagcagaagccgcctccagaaatcgttctgtaatccaattcgttccgactgttgcaaatcgaatcattgctatcgctccttctatgtattggcttacattatagctttttttctgagaaacataaatggaaaaaaggctgccagctaaagggataggaaaaattcccatagagaccggttattatttttcattacaggaacgatagtgtacaatttaagtaaaatacatatgatggaggaacaatagtggaaacattgcaaacatggggcggcagatttaaacagtttttcttagacaataaatttgtcttgtttttgcttgtattgctgctcatcggtctcaatatccttgtctttatgaagacatcatttattttcacacctattatcgtcctgctcaaaacgattgcgctccccgtcattttgacaggaattgtttattatctgcttaatccgatcgtagatatattggaaaaaataagagtgaaaagagtctattccatcctgctcctttacctcattattatagggctgattacgattacggtcgtttcaattattccgtttttaaaggaacagatcatgagcctgatcgacaatctgccgaaatatgtggatatcgttgaagatcagacgaaaagcctgatcggaagcgattttgtaaatcaggcgcaaaagacgatgaatatcaacatttccgatcttgctaataaagtatcggcgcaggcggcgacaattgcaaacagcacatttaccggagtcgggaattttatcggcgcgctgacggaagtaattatttcaattgtgaccgtgccgtttattctgttctatttgctgaaagacggcaaaaaactgccgatttatatcttaaagtttgtgcccacccgtctgaaagaacaaacgtatacgatgcttagtgaaatgaaccacagattaagttcctatatcagaggacaggtcatcgtcagcttctgcatcgggtttttattatttatcggctatctgattatcggacttgattatgcgtcactgcttgcggtcattgccgcttgtacgagcgttgttccgtatttagggccgaccattgccatcacgccggcgattattatcgcgttggtcacttcgccccttatgctgctgaagcttgcgattgtatggaccgttgtccagctcgtggaaggaaaattaatttcgccgcagatcatggggaaaaatcttcacattcacccgattaccatcatctttgttcttttaaccgccggaaagctgttcggggttgtcggcattattttagccatcccggggtatgcggtcatcaaagtggtcacgacccatctgtttgattggttcaaaatgcgttcgcatttatatgaagaagaaaaaaatgatgctggatcgaagtcataaaatcggaacggacatgatatttattataagacaggctttccttcagaggagagcttctcttttgtaaatgatgaatgaagggaagaatgggatgacactatgggagatgttcacagcagccgttttgggaatcgtggaagggctgacggagtatgcgccggtttcttccacgggacatatgatcatagcggatgacatctggctgaaatccggaagcctgatgaatccggaagccgccaattccttcaaagtggtgattcagctcggttcgattctggcggtggccattgtgtttaaggatcggatattacatttactcggcctcaaaaaaaacgtcacgcgcgatcagcagaagggatacaggctgaccatcgcgcaaatcgccgtcggtcttgttccggcggcggtgctcggttttttatttgaggatttcattgaccgctatttattctccgtcagaacggtcgcttacggattaattgccggagccgtgcttatgcttatagcggactggatcaataaaaggaaagaaacgatcgatacggtagacagaatcacctacaaacaggctttctgtgtcggattattccagtgtctcgccttatggcccggattttcccgctcaggctcaacgattgccggaggtgtcattgtcggcttgaatcaccgggcagccgcagacttcacatttattatggctattccgattatggcgggcgcaagccttctgaagctggtgaaatactggagcagtctttcttatgacatgattccgttttttctagtcggctttatctgcgcctttgtcgtcgccctcttagtcgtcaaattttttcttcggcttattaaccggattaagcttgtcccgttcgccatttaccgtgtcatcctcggcatcattttaatcatgctcgttcgataaacgaagaggcccccggagggtcttctttttatgttcgaaaagcgtctcaggaaaatatgagcaaactgaattttctgcttgaaattcaaagaagactcgtctataataaaacatgacgttacagcacggggccatagctcagctgggagagcgctacgctggcagcgtagaggtcaggggttcgagcccccttggctccatacctttaaacccttattctataagggtttttttatttgtcaggaacagagccaatagccctaaaaagcaattggggacaattttgggacgaaaaatttattttgaggaagtttagttgcttttcgccttcaattaggattgaagaagccgcctctaaaggcggctttgttgtttatcaattttcttgcggagcaatctttgctggtgtagcaccgcagaacaggaagaatgtaaataatactggtggagaaattgctacacctaatttgcctatatattccaatactgtccaccaatctcctttttcaattgccttttgaactttatctaatgctcctttagagataccaatagcatcttcaaggcatctttgaacagtgttcttttggacacttgcatacttatattccttgttcatatagttagcgaaggcgatcataccctctttttgacctttggtataaggagacttttcaagctcaccctcattaactgtgtaacctgtttcttcatcaaaaattacaatcttagtaaagatgtactcaacttcttttaaagatttttcaatttgttctttagttaatccatctaacccgttctcttcctctgctgaaactgttggcgctattgtagcaatagcaagaagtagggtcaacgccagaaaaactaatcttttcaacattataactcccccttttggaaaattgtacaagcaactacatggtaacacatttttttccaaatgagggtatgtttatccggttttaatctgtttagacaggataagtcaaatatcgacaaaaaagattatgaccataaactcaaagcaagagtcgaaaccccccatgctattatcccaaacattacagagaacctaagacaagcttcaaattttgaaagccctcgctctctttttgttttacctaatttccaataaatagcgtatccggagaacaccaaaatgattattccaagtcgtgtcatgttttctaaaaattctataccatccattgattttcacctcgtttttatttatgagaaaaaataaagtagacttgtagagagtctacttatacacgtttatccaaagtacacatttctttagagctgagaacgcttgagtgataaagtaaggctcattttaaaatggcacatccttatcccctccccatttgtattcccgacacattagttttattatcgcaaatagaatggccatttccaacagttatgtgaaaataagtaatgcgtaatatgtctaatggtataagaaatgatgtatcttttatccaacaaaatcatgattttataatcactgtagaccgcaaacaaattgcggttttttttcgttcaaacataatttggaaatgttagaatattatataaaaggaggagtggccttgtgagttctgttttaccatcatcggaggttggcgttaagatcaatgaatggtacaaaatgatacgtcagttcagtgttccggatgcggagattttgaaagtggaagtggaacaagaaataaatgagatggaagaagacgagtatctactgatttactacaccctcatgaaattccgccatcagcttatgctggattatttagaaccggtgactacccgcgtgagaccgacaattgacgagctgctggaaaaaatcgaagcatcaaataaaggaatttccggcctgctgtgctattattctttatttttccgcggcatgtatgaatttgatcaaaagcagtatgtaaaggcgatcggcttttatagagaggctgaaaaacaactcgttcatgtgcatgatgaaattgagagagcggagtttcattttaaactggctgaagcatattacggtatgaaacaaagccacgtctccatgcatcacgtaaagcaagcgctcgatatttacgatcagtatgagttgtataaggtccggaaaattcaatgtctatttgtcgtatcagggaactatgtagactttaaacgttatgaaaaaagcttgccgcatttagaaaaagctttagagttgtcgaaacaagtaaacaataatgaaaggctgctcagttctgcttattacaacataggaaagaattacggagacttagaagaatacaataaagctgaaatctacttaaaaaaagcagcggagatatctgaaaagtataaattgggtaaccttccgcattccttgtttacatacgcaaagcttctatttaaacaagggaaaacaagcgaggcgattcaaatcagcaaaaagggactttcatcagcgatatttcaaggagataagctgtttgaatctctgcaaaaatatttggaggctttatatattaatgcaatagaccaaataggaatcaaacaaacaattgattaccttgagaaaaataaaaactattcgtatgtagaagatattgctcttgatacggctgctgtttatgcagagtcaaagcaatatgacaaatcttatttttatcatcaaaaaatgattcaaacgcaaaaacaaattcagaggggagaatgcctgtatgaattttagaaaaggcgtatttatcattgtgtcggctgtcgttttaatgtcagggatcggtctagcaacatcggctgtttcatttgatggatcttatcaagtttcgtctgatcgtaatcaaacctaagaaggagagtgcctgtatgaattttaaaaaaagcatcttcattattttgggtctgtcgttatcttttatatgcgaagtgggtgtgaacacagtggaaaaacaaacacatgatacctttcaaactgcctcagatcgtttccagacttgatcagcttacgccttttcttcggaaaaggcttttttcctttcttcattatattgtttcaaaacatccacttgtttttattcttatcccatttcagcatacgctgcctcatgaggttcttcactgcttcccggatagcgcgttcatccttgccggtttttctcttcaattcatccaaggaggggttttttccgaattggatcatgttaaagataatccggtacacttttcattcgaaatcagtcatttgatcatctcccacttcataagtctcaacggataaaagagaatcaaatacaataatgtatccacctttaagttctcgacaagagtttccttccgtatgtggtcccgtaatgaactgcgcagataacctcgcgtatgtattcgtcgtcttaaagctcgaacgataaatctatgctaatattaaaaaaatatggcactctatatttttagatcttaagaatatataagaattgataagctcaattttcaaatttaatggagggaaaatagaaaggagagaaatgagaaagtattttggaatagtgtcgcttatcatccttttattcgcattgtgctttctgcctcatattcattgggcgcttggaatcctaggaattgtcgtggggagtattctagcaatcaaatcgcctaaaggaattgcaaagaacatttcttttgttatcctagcactttgtttacttttactattattattgattgtgatgggcgttttgatggcaggtctagtggaaaattaacctttaatttattatcctatttggggaccaacttattcatttttagccaaataaaagattagggtttgaaataaaacgtctgttcgtatcaggaactcatctccacaccggcagcgtagaggtcaggggttcgagcccccttggctccatacctttaaacccttattctataaataagggttttttttgttttttcatcttctgcggcagcctctatgttctgcttcatttctaacaactcaaaataaaggaaagagagaaaatgaaaaagaaaatctatcttctactaactctttcagcggcactggcacttcttttaacagcgctcccggctctttctcccgtcgtcttcacgtctgcttcagaaaaaggagccatcaggcatgacatttataaaaaaggatatccgtatcaaagctactttgcgattcttcgaaaagaagaaggcggcggagaggccgggaacctttattatgtaaattggttcaattggaaagatgataccggacagacgccgcacgtatgttattcaaaaaaatcgtccgaaggcgagtacaaagtaagctgcggaaccggaccgtaatgatcaagagcccctcttcaatgaggggctctttctgtcaatgccgctctggctctccgtttaatatccccaatataacggcgtatcataatgccgatacggatcattcggataatgcgtatttggctgataaggcgtattcatatcatgaatccccgtgttttcagtctgtccgcagtatttatcggggcctatcacagttgattgccggatcggtgaaacggctttttcccactcatgctcattcagacagtacgtatgcgccatgatctcaggcggcgtcagacggagaatatccgagccgtatatcacttcaggcgaaggggcgtcaaatatggccaaaaggtgggttttgtctgaagtggcgacttcataatgccaccacccctgcggaacattcgccacttgtcctgaagagatcggataattccgtattttctgggtgaacggattcagcatcgacaccaccgcggaacccgaaatacagtacaccaattcagcggcgttttgatgggtatgcggttcaatcacatttgttttgctcagaaagatatctaataatgaaatattttcaagcgtgtttaactgtttaatccccaatacattgataaagttccgagcatctttcgtaaaaaaacggctctcattcacatcataagtgaactgtgtattcggagacgtgtaatcgatatcggaaaccatgcactcccccgctttcatctttaaacgtatattcccaaatatatgtgtccctgtttcaccgggtgataaaaaaaggaggtgaaatccataaattccaaatccaacacaatattgtgacgacttttttaaagattcattttcaatatatcttttattcgaaatatctcttactataaagatatattgaaaatacatctttagaagggttgaggattaacatgctggatgagagaacaatagacatcatcaaaagcacagtacccgtattgaaaacacatggagaaaacatcaccggacgcttttataacctgatgtttcaagatcatcccgaactgttaaatatgtttaaccaaacgaaccaaaagaaacagactcagcgcgcagcattggcaaatgcagtcattgcggctgcggcgaatattgatcaattagaacaaatcattccggcggtcagacagatcggccataaacacacaagcatcggtgtaaaaccggaacattatccgattgtcggaaagtatctgcttctggcaattaaggatgtgctgcaggatgccgcaactcctgagattatgcaggcatgggaaaaagcttacggtgttattgcggaggctttcatcggcattgaaaaagacatgtacaatgaagccggatggcaggggtataaagaatttacggttatacagaaaacgaaagaaagcaaagatattacatcattttatatcaaaccgagtgacggctcttcgcttcctggatttgaagcgggacaatatatcagcattaaagtgcggattgcggattctccttatacgcacattcgccagtacagcctgtctgatgcttctcaaaaaggggcatatcggatttctgtgaaaaaggacggagcggtttcttctcatctccacaatgaagttcaagagggagataaacttgaagtcagcgcacccgccggggatttcaagctgtcttctgccgaaaaaccggttgttcttatcagtgccggctccggaatcacgccgatgatgagcatgctgaaaacagccgccgaaaaacagccggagcgttccgttacttttattcatgccgcgaaaaacggagagtacgccgcgttccgcaaagaggctgaacaagctgcggagaatcatccgaatattaacattatttatgtatacagtgaaccggcagaacaagaccgctcaggagacaagcctttttacagcggcaggattgatcaaaccttcttggagcagcttcatctgaatcaagatgctgaatgttacttgtgcggatcagcgcagtttatgacgcaaatgaaagatatgattcttgccctcgggtttgactctgattccgttcaatatgaattgttcggccctcagctgagcatggcataaccaaaaagactcctcaaagaggagtcttttttatttgcgcaatatgttctttctccgtctttttccctattttattgaaattttcatcaatgaccagtaaaattataaatctagtgattccggaattaaaggaaggttgatatgaaaaagaaagcaaagaccaaaagggggcttgggtgcctttttgctgtatctcttatattcggattatttctggtatcaatggtgttttcgaaattcatagtgacggaagaaaaaccgcctgaagaggtggacgagcagcaggtctttattgacagcctttccgggcatgctcagattttatatgagaaatatcatgtccttccgagcatcaccctcgcacaggccattctcgaatcggactgggggaacagtgagcttgcggggaaagcgcgcaacctgttcggtgtaaaaggtgattataaaggaaaacacgtcacgatgaaaacggatgaatttgaaaaaggaaaacgaaaaacgattcgggcaaaattccgtaaatacagcacgttttttgaatcaatggatgaccatgccaaattatttgtcaacggaacgtcttggaataaaaagaagtataagcctgtcattgaagcggacaattataaaacagcggcggctgcccttcaaaaatccggctacgccacagaccccggctatgctgaaaaaattaaagatgtcatagaaacctataacctgaatgaatatgacaaaatcaatgcctctcttaaagcagttgatatgaaaggcgccatcaaagaccacgccattgaagacgtgtggtccaagccgtcaaaagagcggcattctattaaactggcatcggcgcaaaagtttaccggccagcatattaaagtcgtatctgaaaaacaaaacggagaatccgtctggtaccaaattcaagtgaaagatgagctgatcggctgggttgaccaaaccgccgtccagttaagtgaagaaacataagcatcaaaaaaagccggcagcccgccggcttttttacattccttcagtttcaaaccttttaatatcacgtttatgccccatcagcacaaggcagtcacattcatgaatgacagtctccggagaaggggacagctgaatgtcgccgttatgtttcacggcgagaatgctgcagccgaatctggcccggacgccgagctcaagaatggattttaaatgcagctttttcgtggctgaaagctccacgatgctgtattcatctgacaaatcaatataatttaagacgttttcatccgaaaggctttgcgcaatccgcacgcccatatccttttcgggatggataatacgatcagcaccgatcttttcaagcactttgtgatgataatagttttgtgctttcacccaaatattagggatgttcagctccttcaataacagcgtcgtcagcgtgcttgcctgaatgttggcgccgattgctacgatgacatattcaaaatttctgatgccgagcgactgaagctcgctttcttccgttgaatttgcccgcacagcatgcgtggcataagaggagtatgcgttgacccgctcttcgctgatatcgaccgcaagcacctcatgccccattttaaaaagctctttacagatgcttccgccgaaacgtccgagtccgatgacggcaaattgtttatttttgatttttcccaatcctcataactccttaagaaactgttttcgtcactccaaatacaacaaacaagaatgtactcctgtttcaagggtttgtcaatgcgagggccggaagaaagaaaacagcacgaaaaaagaccggctgacaagcgatgggcttgtgccggtccgtttttcgcaattatttgcagttgcaaggctgtgtcggcggtgtgctgcgtttttgaacaacaattgtgtcctcagcatagaatttagagccgatgcttaatgatttattttctgcacggaacttatatgtacctgcagcaggcaatgttttattattaagagaaagcttaaattccgctgcgccgagcaaatcaatgtttaacggaagtctgactgttttgccgttattcagaatctgtctttcacgcaaagcgtgtccgttgactgtatcttttgttgtagccgcaaatccgctaggaagggtaaattccataacgcctaagctcaggatcgtgttcggacggtacgtcaattcgatatcagaaaatgaccattcctgctggctggcacctgtatattttgcaaataaggtagcagtcgctttcgtggacatttccggctcgtgaacggttgagcctgactcagcggcgaatgacgctgtcggcagagaaagaagcaaaaccaggccgaataaacttgccatgacagttgagaaaaatttctgtttcattttcataaatccccctaaaaaaaatttgctggttgttcttaaaaaagaacgaccatacctataaaaatttaccatcaattttaatggaagtaaatggggttatgttcctatattttctcaaaaataatcaaatcacgacaaaaaacgcctgattttgattcaggcgtttttttcgtcggtttctatcggaataaatttaaaaatctccccgctctgaaccgagtcagcgagacgcttcagccaatgataataagctttcgaactttcaagctgatcatataactgccgcgcttcttcctgtaattccgcgttgccttcctcggccagcaaaacggactgcaaatccgcctgggcctgttcgatggcggacaaattcacctgaacttcacgatcccatttcggcgggaagaaattcgtgaaaaacgtaaagaaatctttttccgctacaaacgtatgcttccgtgtgccgcggtgaaaggtttttttgaccacatttaaatcctgcagctttttgacgcctgtgctcatactcggtttgctcatctgcagttcctcacgcatttcgtcaagcgtcatttcatccctcatatacattgttccgtataaaatcccgacactccgggtgattccgtaaagatccatcgtctctgcaatggaatcaatgacaagatccctggcttgttctatagctgcgaattctggattctcatccatactgtccctcttttcctcttgaagtttaaatttgttaagtcatttctttatgttcttaatcttaacgaatcatgacaaaatgtcaaaatctaaacggactgaccgggttttgacaggtaaaaaaacatgtgttaaattaatattgttaaaaacattaaatttttatttaacaaacttacttttcggtaaggaggactcttatgagcaaaacgctttatatcggcggcgaatggatcagtgcagaaaaaaaacagacgcgccgtatcattaatccatttaatcaagaagaaattgcaacggtatgcgaaggagaccgggatgatgcggtgaaagccatcgccgcagccagaaaagcatttgatgaaggggagtggccggtgctttccgggctcgagcgcggacaatttgttctgaaaattgcggaattaatcagacgcgatctgaacgaattagctgagctggaatcgctcgatacaggaaaaacgattgaagaaagtaaagccgatatggatgatatcgcaaatgtatttcaatattatgccggtttggcggataaagacggaggcgaggtcatttcatctccgattcccgattccgtaagtaaaatcgtcagagagcccattggcgtatgcggacaaattacgccgtggaactatccgctccttcaggcgagctggaaaatcgctcctgctcttgcggccggaaacacgatcgttttaaagccgagcgagattactccgctgacaaccattaaagtctttcaattaatagaagaagccggtattccgaaaggggtcgccaatctcgtgctggggccgggcgcctctgtcggcgacgagctggcgagaaacctcgacgtcgatttggtctcttttacgggcggaattgaaacaggcaaaaaaatcatgcaggcggcaagcggcaatgtgaaaaagattgctctggagcttggcggcaaaaatccgaatatcgtattccaagatgcagatctcgaaacagctgcagatcaagcgctgaacgccgtgtttttccatgccggccaagtatgttcggcagggtcccgtcttttggtggacgaagccattcatgatgaatttttagccgagctgatcaagcgcacgaaacgcatcaaattaggaaacggttttcatgaagatacggaaagcggtccgctgatttccgccgagcatcgggccaaagtcgaaaaatacgtagaaatcggcatcgaagaaggggcaaaactggaaacaggcggcaaacgtcctgatgatcccgcccttcaaaacggtttcttctatgaacctactattttctcaaactgcaagtctgatatgcggatagtccaagaggagatcttcggccccgttttaacagttgaatcattttcttctgaagaagaagtgatcagacttgccaacgataccatttacgggctggccggagcggtatggtcgaaggatattgaaaaatgcgaacgcgtagccgccaaactgcggatgggaacggtatggatcaatgatttccacccgtatttcgcgcaagcgccatggggcgggtacaaacaatcgggcttcggccgcgaactcggcaaaatcggtctggaagaatacacggaaatcaaacatatttaccgcaacacgaaacctgcggctgtgaactggtttcaagcataacgaggaggagatacaatatgacattaaatatgaaagtagaaagcatgcataaattccatacattcgaaatcccgacagtcattaaacacggaatcggtgcgattcagcacgcgggaagtgaagtcagagcgcttggcgtcacaaaagcgctgctcgtaacagacccgggaatttataacgcaggagtggcaaacccagtcattgaatctttgcaggaagtgggcatcgaagtcgtcctgtttaacaaagtggagccgaacccgcctgtacgtcttgtaaacgaaggatcagaactgtataaaaaagaaaactgcaacggtcttgtggctgtcggcggcggaagctccatggatacagcgaaagccatcggggtagaagcgacacacgaaggaagcgtgcttgattatgaagccgcggaaggcaaaaagccgctggaaaaccgtattcctccgctgacaacgatcccgacgactgcgggaacaggttcagaggtcacacaatgggcggtcattacagatgaagaaagagaatttaaattcaatacgggcggaccgcttatcgccgcgcatttaacggtcattgaccctgagctgcacacgtccatgcctccgcatgtgacggccatgacaggtattgacgcacttgcgcacgccatcgagtgctatacgatgaaattcgcgcagccgatcactgatgccgtcgctttaatggccattgaatatgcggcgcattatattaagcgcgcgtttgcggacggagaggatttggaagcaagatacggcatggcgcaggcggcgatgcttgccggcctttcatacggcagtgaatcagcaggcgcggcgcatgcgatgagccagacgctcggcggcatcatccctgtcgctcacggacaatgcgtcgcagctatgatggggccggtaatggaatacaactggaaaggctatccggaaaaattcgcccgcatcgccaaagcattcggaatcgatacaagcaacatgacaaccgaagaagcggcaaaagcgtccgtcaactggatgtatgatcttgtaaaagatttagaggtgccgagtttagaagaacaaggtgtgtctccggacatgattgaacgtttatcaaaagaagccatgaaagatccgcaaactttcggaaatccaagagatttgaatgagaaagcatacaactggatttacaaacgctgctttgacttaacgccgaaaacggtataataaatgaaccccgctcctttacagagcggggttttttaaggataatgtcaagaaaaaggcggtggtggctgatgtggaaacgcataacagcaaagacggaaggcgtatatatagcggataccgaacaatttgttaccaaaaagatggacaagcttcgcgcggaatacggcgggttccccggtgacttgcatttcggactgacaaaaaaggccggcgcgcgtgagccgatgtatgaaagaggaacagaaatttttaaccggagacagatttcaatcgtgtccatggaggaatgtgatgacattgcggagaagatggggatttctcatatctttcccgaatggctcggcgctaacatcgcaatcagcggtttttctgcactgacgccgcttaaagaaggaagcagaatgatatttccaagcggtgcgtctctgttgtgcgagggagaaaatgatccgtgcattcagccgggagaagtcattcaatccttttatccggatcagccaaaactcgccgcggcgtttgtgaggcacgcgatgggcagaagaggaattgtctgtattgttgaacgcccgggtgacatatgcacgggcgatgcggtcaccatccattcttatgaaccgaaacgcgccaagaaaaaaatcgagaaggtctgactcagaccttttcgattttttgtttgatttcttttatttgattaatgtgacgcttttcatgatggccgataaaatcaatccactggcggatcgtcagttcttgaaaaacaggatgcggaagcacacgttcaaagtcttcctcgtttaatgatgaaataactgcggtcagctgctgtcttgccgtatctaattcttgttttgcttcaatgactgataatcggttttgctcaggttcgaggtgtgacggcgccggccgtttatctgttctgtcctctataaactccatcggtttttcttctatttcttttaacggtgcgtcttttgcctgctttgataaaagggtctgcgctgtttcgtcaattttctttaaatggtcaaggacttcccgcacgctccactcatcagccgcgggctttcggttgaattcctcatcagagagtcctttcagttcttcccagatctgctgtctggcttcattaaaaatgctcatcctatctcctcctttagagtaaacatatcatatccggattggataatcatgtaatcagccttccttatcagaaaattgaaaccatttacctttacatccgtatataaagtaacactccgacacctcggccgaaaggaggatagaagatggacatatttcatctgccgcttgaaacggtctatctttacacattgattatttcgggaagcctcacgcttttgattctgttttttcaagatgtgtttcacggcctctcggaagccattcctgtttcatttttaaaccctgcattgattctgtcttttttaacaatcttttcagcctcaggttatatcggcgaaatcgccgctccgctatcaagttctgtcattgcgttgctttcatttgttctttcggttcttttggtcagcctgcttcacttcttcgtccttgtcccgctttcatcagcggaagaatcgctcgcttatcgggagacggatttaaagggcagagtcggcagggtcattacttccgtcccgaaagacggctatggagaagtgatcatagagggaatagggggcgccatttctaaatcagccgtcagctttgatcaagaacagatcaagtacggaactgccgtattagtgattgacgtgaaagacggagtgctttttgtgacgccgcatgaaccaatctgatatctaagggggaactgttatgactatgccgattatcatcgttatcggaatcgtattctttttactcatcgcacttattgctgtatttattacgaagtaccggacggcggggccggacgaagcccttatcgtgaccggaagttatttgggaaataagaacgtccacattgatgaaggcggaaatcgtctgaaaatcgtccggggcgggggaacgttcgtgctcccggtattccagcaggcagaacctctcagtttactgtcaagcaaacttgatgtctctacacccgaagtctatacagagcaaggcgtgccggtaatggccgacggaaccgccattattaaaatcggaggctctatcagtgaaatcgcaacagcagctgaacaatttttggggaaatctaaggaagaccgtgagcaggaggcgcgggaggtgctggaaggccatctgcgctccatcctcggctccatgaccgttgaagagatttataaaaacagggaaaagttttctcaggaagtccagcgggtcgcgtctcaggatcttgctaaaatggggctcgtgatcgtttcttttacgattaaagacgtccgcgataaaaacggctatcttgaatcattaggtaagccgagaattgcccaagtcaagcgggatgcggacattgccacggcagaagcggataaagagacgaggattaaacgcgcggccgctgataaagatgcaaaaaaatcagagctggagcgggcgacggaaatagctgaagcggaaaaaatcaatcagctgaaaatggcggaatacagaagagagcaggatacagcaaaagccaatgccgaccaggcatatgatcttgaaacagcaaaagcccgccagcaggtgacagagcaggaaatgcaaattaaaattattgagcggcaaaagcagattgaattggaggaaaaagaaattctgcgccgtgagcgccaatatgactctgaagtgaagaaaaaagccgatgctgaccgttactcggtggaacaagcggccgcggccgcaaaagcgaagcagctcgcagaagcggatgccgagcagtacagcatcgaagcgatggccaaggcggaagcagaacgcgtgagaattgacggtcttgctaaagcagaggctgaaaaggcgagaggagaaaccgaagcggaagtcatccgcctgaaaggtctcgcagaagcggaagctaaagaaaaaatcgccgaagcattcgaaaaatacgggcaggctgcaatccttgatatgattgtgaaaatgctgcctgaatatgcgaagcaagtctcagcgcctctttccaacattgataaaataaccgtcgttgatacgggaggaagcggtgaaaacggcggggccaataaagtcacaggctacgcaaccaatttaatggccggtcttcaggaaagcttaaaagcatcttccggaatcaatgtaaaagagcttattgagaatttttcaggcaaaggcaacataaaacaaagtataaatgaacttacaaaagaactgagtgattcgaacgaacggcacagcccggaataaaaaaacagcaggcgtaaaccgcctgctgtttcagttcgtccgcttagcttcaagaagccgcggcgcagtcatgaataataagataaggacaatggccgaaaggataaaagaaggaatcatataagtcgcgttatagacggacgaataaatccataccggcgtgcctttcggagcatagcttccgaaaaagaccgctccggagaccacatgtgccgcatagcgcagcacactgccgatgaaaacaccgcctataacatacatcgttaaagcgcctctttttttattcaatgccgattcccgtacaccggaagcaaacaagccgctgaaaccgagaactgcaaaggccgcgatgtaatcaagaaatagctggaccgggtgctgcaaaaacaaattgccgatggcgatctggacaatccctgtcaaaaagcctgtcgtaagcccggctttcactccccagcggaatgaaatcaaaaaaatcggaatcatcataatagagaccgaaccgccttggggcatccggagaaacatacctgagacaatgtccagaatgacagccgccccggtcataatcgctatttcaattaagcgcacaagccgtgttgaatgattcatagttttccccctggtcagacaaccgtaacaaggataaacaaaaaagcagcgcggggaaggatgggaaaaggtccgcgcgctgcttgcataaactgcaaatcatttggctttgccacatccctacgccagcgttaactaacaggttcaaagggtcagaacaaaatgttcactctcagctttaatgctccccttgtggtcatcaagtatttagttcaatcttactatacaagaaaatatgccaaaccacaagacagcttatctttctatagaagagaaactgaaataagtattaaagaaaataattaatgatttttttaaaaaaactattgtcatattttcaaaagggtgttatattattaaacgtcgctgatgaacaacagacaacaacgaaaagcttcgcaaacaacttaaaaaaagttgttgacataaaagaagctgagtggtaagataataaagctgcttcaacaagcggtaatgatctttgaaaactaaacaagacaaaacgtacctgttaattcaaagttttaaataaatcgcacagcgatgtgcgtagtcagtcaaactactttatcggagagtttgatcctggctcaggacgaacgctggcggcgtgcctaatacatgcaagtcgagcggacagatgggagcttgctccctgatgttagcggcggacgggtgagtaacacgtgggtaacctgcctgtaagactgggataactccgggaaaccggggctaataccggatggttgtttgaaccgcatggttcagacataaaaggtggcttcggctaccacttacagatggacccgcggcgcattagctagttggtgaggtaacggctcaccaaggcgacgatgcgtagccgacctgagagggtgatcggccacactgggactgagacacggcccagactcctacgggaggcagcagtagggaatcttccgcaatggacgaaagtctgacggagcaacgccgcgtgagtgatgaaggttttcggatcgtaaagctctgttgttagggaagaacaagtgccgttcaaatagggcggcaccttgacggtacctaaccagaaagccacggctaactacgtgccagcagccgcggtaatacgtaggtggcaagcgttgtccggaattattgggcgtaaagggctcgcaggcggtttcttaagtctgatgtgaaagcccccggctcaaccggggagggtcattggaaactggggaacttgagtgcagaagaggagagtggaattccacgtgtagcggtgaaatgcgtagagatgtggaggaacaccagtggcgaaggcgactctctggtctgtaactgacgctgaggagcgaaagcgtggggagcgaacaggattagataccctggtagtccacgccgtaaacgatgagtgctaagtgttagggggtttccgccccttagtgctgcagctaacgcattaagcactccgcctggggagtacggtcgcaagactgaaactcaaaggaattgacgggggcccgcacaagcggtggagcatgtggtttaattcgaagcaacgcgaagaaccttaccaggtcttgacatcctctgacaatcctagagataggacgtccccttcgggggcagagtgacaggtggtgcatggttgtcgtcagctcgtgtcgtgagatgttgggttaagtcccgcaacgagcgcaacccttgatcttagttgccagcattcagttgggcactctaaggtgactgccggtgacaaaccggaggaaggtggggatgacgtcaaatcatcatgccccttatgacctgggctacacacgtgctacaatggacagaacaaagggcagcgaaaccgcgaggttaagccaatcccacaaatctgttctcagttcggatcgcagtctgcaactcgactgcgtgaagctggaatcgctagtaatcgcggatcagcatgccgcggtgaatacgttcccgggccttgtacacaccgcccgtcacaccacgagagtttgtaacacccgaagtcggtgaggtaaccttttaggagccagccgccgaaggtgggacagatgattggggtgaagtcgtaacaaggtagccgtatcggaaggtgcggctggatcacctcctttctaaggattttaacggaatataagaccttgggtcttataaacagaacgttccctgtcttgtttagttttgaaggatcattccttcaaaacataggaacacctgctaaatgcgccacttcctgtggcaacgcatgtgttagcacgtcctatgcgttgttctttgaaaactagataacagaagtaattcacattcaattagtaatgcaagatatcacgtagtgattctttttaacggttaagttagaaagggcgcacggtggatgccttggcactaggagccgatgaaggacgggacgaacaccgatatgcttcggggagctgtaagcaagctttgatccggagatttccgaatggggaaacccaccactcgtaatggagtggtatccatatctgaatacataggatatgagaaggcagacccggggaactgaaacatctaagtacccggaggaagagaaagcaaatgcgattccctgagtagcggcgagcgaaacgggaccagcccaaaccaagaggcttgcctcttggggttgtaggacactctgtacggagttacaaaggaacgaggtagatgaagaggtctggaaaggcccgccataggaggtaacagccctgtagtcaaaacttcgttctctcctgagtggatcctgagtacggcggaacacgtgaaattccgtcggaatccgggaggaccatctcccaaggctaaatactccctagtgaccgatagtgaaccagtaccgtgagggaaaggtgaaaagcaccccggaaggggagtgaaagagatcctgaaaccgtgtgcctacaagtagtcagagcccgttaacgggtgatggcgtgccttttgtagaatgaaccggcgagttacgatcccgtgcaaggttaagcagaagatgcggagccgcagcgaaagcgagtctgaatagggcgaattgagtacgtggtcgtagacccgaaaccaggtgatctacccatgtccagggtgaagttcaggtaacactgaatggaggcccgaacccacgcacgttgaaaagtgcggggatgaggtgtgggtaggggtgaaatgccaatcgaacctggagatagctggttctctccgaaatagctttagggctagcctcaaggtaagagtctcggaggtagagcactgattggactaggggcccctaccgggttaccgaattcagtcaaactccgaatgccgatgacttatccttgggagtcagactgcgagtgataagatccgtagtcgaaagggaaacagcccagaccgccagctaaggtcccaaagtatacgttaagtggaaaaggatgtggagttgcttagacaaccaggatgttggcttagaagcagccaccatttaaagagtgcgtaatagctcactggtcgagtgactctgcgccgaaaatgtaccggggctaaacgtatcaccgaagctgcggactgttcttcgaacagtggtaggagagcgttctaagggctgtgaagcaagaccggaaggacttgtggagcgcttagaagtgagaatgccggtatgagtagcgaaagaggggtgagaatcccctccaccgaatgcctaaggtttcctgaggaaggctcgtccgctcagggttagtcgggacctaagccgaggccgaaaggcgtaggcgatggacaacaggttgatattcctgtaccacctcctcaccatttgagcaatggggggacgcaggaggatagggtaagcgcggtattggatatccgcgtccaagcagttaggctgggaaataggcaaatccgtttcccgtgaaggctgagctgtgatggcgagcgaattatagtagcgaagttcctgattccacactgccaagaaaagcctctagcgaggtgagaggtgcccgtaccgcaaaccgacacaggtaggcgaggagagaatcctaaggtgatcgagagaactctcgttaaggaactcggcaaaatgaccccgtaacttcgggagaaggggtgctctgttagggtgcaagcccgagagagccgcagtgaataggcccaggcgactgtttagcaaaaacacaggtctctgcgaagccgtaaggcgaagtataggggctgacgcctgcccggtgctggaaggttaagaggagcgcttagcgtaagcgaaggtgcgaattgaagccccagtaaacggcggccgtaactataacggtcctaaggtagcgaaattccttgtcgggtaagttccgacccgcacgaaaggcgcaacgatctgggcactgtctcaacgagagactcggtgaaattatagtacctgtgaagatgcaggttacccgcgacaggacggaaagaccccgtggagctttactgcagcctgatattgaatgttggtacagcttgtacaggataggtaggagccttggaaaccggagcgccagcttcggtggaggcatcggtgggatactaccctggctgtattgaccttctaacccgccgcccttatcgggcggggagacagtgtcaggtgggcagtttgactggggcggtcgcctcctaaaaggtaacggaggcgcccaaaggttccctcagaatggttggaaatcattcgcagagtgtaaaggcacaagggagcttgactgcgagacctacaagtcgagcagggacgaaagtcgggcttagtgatccggtggttccgcatggaagggccatcgctcaacggataaaagctaccccggggataacaggcttatctcccccaagagtccacatcgacggggaggtttggcacctcgatgtcggctcatcgcatcctggggctgtagtcggtcccaagggttgggctgttcgcccattaaagcggtacgcgagctgggttcagaacgtcgtgagacagttcggtccctatccgtcgcgggcgcaggaaatttgagaggagctgtccttagtacgagaggaccgggatggacgcaccgctggtgtaccagttgttctgccaagggcatcgctgggtagctatgtgcggacgggataagtgctgaaagcatctaagcatgaagcccccctcaagatgagatttcccattccgcaaggaagtaagatccctgaaagatgatcaggttgataggtctgaggtggaagtgtggcgacacatggagctgacagatactaatcgatcgaggacttaaccaatttgaatgtatgcttactgttatctagttttgagagaacactctcaatggtttggtggcgatagcgaagaggtcacacccgttcccatgccgaacacggaagttaagctcttcagcgccgatggtagtcgggggtttccccctgtgagagtaggacgccgccaagccattacacgcaagtgtaatatacggaggattagctcagctgggagagcatctgccttacaagcagagggtcggcggttcgagcccgtcatcctccaccattcctatcatacataagttggcgtattaagccggtgtagctcaattggtagagcaactgacttgtaatcagtaggttgggggttcaagtcctcttgccggcaccacctttatatgttatactatataagtctcttgtaataagagccattagctcagttggtagagcatctgacttttaatcagagggtcgaaggttcgagtccttcatggctcaccatgtttttcttgcggatgtggcggaattggcagacgcgctagaatcaggctctagtgtctttacagacgtgggggttcaagtcccttcatccgcattgccaaacgcggaagtagttcagtggtagaacatcaccttgccaaggtgggggtcgcgggttcgaatcccgtcttccgctccaactatactataccatccatgccggggtggtggaattggcagacacacaggacttaaaatcctgcggtaggtgactaccgtgccggttcaagtccggccctcggcacttattgttgcgcccgtagctcaattggatagagcgtttgactacggatcaaaaggttaggggttcgactcctctcgggcgcgccatacatacttttgaaaaacgggaagtagctcagcttggtagagcacatggtttgggaccatggggtcgcaggttcgaatcctgtcttcccgaccattttggggccttagctcagctgggagagcgcctgctttgcacgcaggaggtcagcggttcgatcccgctaggctccacttgattttaattgttttttggcggtgtagctcagctggctagagcgtacggttcatacccgtgaggtcgggggttcgatcccctccgccgctaccattggacctttagctcagttggttagagcagacggctcataaccgtccggtcgtaggttcgagtcctacaaggtccaccacttatacggaggaatacccaagtctggctgaagggatcggtcttgaaaaccgacaggggtgtcaaagcccgcgggggttcgaatccctcttcctccgccatatctaatttaattatcatcgcggggtggagcagttcggtagctcgtcgggctcataacccgaaggtcgcaggttcaaatcctgcccccgcaaccaaaaaatggtccggtagttcagttggttagaatgcctgcctgtcacgcaggaggtcgcgggttcgagtcccgtccggaccgccatttataaaaaggctcggtagctcagttggtagagcaacggactgaaaatccgtgtgtcggcggttcgattccgtcccgagccaccatttaatttaatattgttttggcggttgtggcgaagtggttaacgcaccagattgtggctctggcactcgtgggttcgattcccatcaatcgccccaaacaacatgcgggtgtagtttagtggtaaaacctcagccttccaagctgatgtcgtgggttcgattcccatcacccgctccatttttatattgtcatgggcctgtagctcagctggttagagcgcacgcctgataagcgtgaggtcggtggttcgagtccactcaggcccaccatgatgattttccacagtagctcagtggtagagctatcggctgttaaccgatcggtcgcaggttcgaatcctgcctgtggagccatacggagaagtactcaagtggctgaagaggcgcccctgctaagggtgtaggtcgtgtaagcggcgcgagggttcaaatccctccttctccgccataaggcccgttggtcaagcggttaagacaccgccctttcacggcggtaacacgggttcgaatcccgtacgggtcattaaaaaaaccttgcatactatgcaaggtttttttattatgcgttcatagtgtaaatggtaaaagacaggtatgtggcaaaagcgctccataataaataagggaccagaagccaggctgaagctttactgtatttaccggcaatgagcaacagaatgagtgttgtcacagccacaagcaggcaatcgatagatgcagcaagcaaatttttctgtgtgaattgaaaatagctgaatccttgattcacgatataattgatgagaagcatcacccaaaaagctttggattctttacatgaaaactttgggtatatcaaggctgctgagagcgaaataagcgcaaacaaaaccgcccatatgatgccgatcactgatccgctcggcgtccagtcagttttttgcagcgcgtcataccattcacggtcgatgggaaagagaacccccgctaaagaaaacaagacatatgtaatgataaatacaataatcgcaccgatatacttctttttcatttgttccctccgtcattcaatgtcaatacgttagttcccttttttggaaatattaaaccttttaaaaggttcatgcatcattaagtgtatgagttttcagtgtaaaaatgcagcaaaccatttatttgtattcaaaaaccccggcaggccggggttttaatcagcatgaagatcgccgaaggtcgtcataattccttgttcgtccaattcctgttcatatttttcgtgtgctttgcttggatacacggaaatgtttttgccggtaatatctgtcgcgataaagttttcataatcctcagcatagccgatgttttcttccgagttcattgtcatatccccatagctgagcggaggatcctctaaatcctgaggcgtttctgagtttccgtattcctcaacatcctgataagcatcttcactatcgtaagccgcccggattgattcatcatcatcaaattcaaactgtccgaacggagtttcctcttcaatcggcctgtctttggaaacggcatcctgcgaggaatattccgccaatgtcgtagccgtcggcagagcttcgagtctgtcataaggaatgtccttgccgctgacttcacatgtgccgtatgtgccgttttcaatttgtttcagagagtaatcaatatcgcgaaggtgctctcgttcatggtcgagcagagccaggtctttttcccgctcgtataattcggtcgcctgatcgccgggatgattgtcataggaagacaattcgccggatgactgatacgggaattcatcagttaactgaaatttgtcattttctttaaagcggcttaaaatatcatgtctggcttcttctaattctttttttaagtgtgtaatctgttcgtttgtaagcacatcaatccctcgtttctatgtgatacttactgttagtatgaacgcttttgcgcagaaaaatggtggataaaaatagtcattttcccatgaggaagtaaaaggatacagtgattgccgagagtggggaaagaaaattcaagtttgtttctttattcatttgcgcaaaaaggtttataataagaaatgcaggcattttgtcgtgctcacatctgtgtgtttgacacaaagtcatcacaggtgtattgtattaaaagcatttaacggattatggaggaatgtctcatggtgacaacggtgcagcatacgttccgagaggaagcagatcatgcattacataaagccaaacaagtcaaccatgctgtcttattgagctattcaagacgtattgcgtctttagaccctctatcatttttcaaagacggagcaaaaaaatataaaggcaaacgatttttttggtcagaacccggtagtgaattaacaatagtcggtcttggcacagaagcgctgttccaatcgaatgaaaaaaatggaaagcgttatcacgacgtttttgaacaatgggagcgctttaaaaagacggcttttcatattcatgaagaagaagaggcggcgcataccgcggtcggccctgtcttattcggcggtttttcatttaatcctgctgaagagagaggagacgaatggaacgggttcgaagaaggactgttctttatcccctcactcatgctgacaaagacggcagatggtgattatttaaccgtcaatcaatgggcggcagacggtaatctggcagaagatacgctgaaacgtctgaaatctttttcggaagctttttcagtttcttcaatcgagtatgaagaatatcctgttttaacaaaagcggaagaacttgatgtggaaaactggcttgaagccattaaaacagcaacaaatgatatgaaagcaaatcaatatgataaagtcgtgctggcaagggaagtcgttttgtcatatgatgggcctattccggcggagagcgttgtccgcaagcttttgacggaccaaacgacaagctatgtttttgcgattgagcagggagataaatgctttgtcggcgcttcaccggaacggctgatcaaaaaatccggcaaagacgttatgtccacctgtctggcaggttcaattaagcgcggagaaaatcaacaagaagatgagcgtctcggcaaagagctgctgcatgacgaaaaaaatctcgcggaacatgattttgtggttcagatgatacacgattctttcttgtcgagctgcagcgatgtgaaaaagcctgcaggtccgcaattatataaaacaaaaagtgttcagcatctatatacaccgatcacaggccatcttaaaacgtccgcttcgctgtttgatttaattgaaaagctgcatcccacaccggcattgggcggagctccccagcagaaagctgttgaagttatcgctgatattgaaccgatgacacgcggatggtacgcggcaccgatcggctggatggacggcagggaaaacggagaatttgtcgtggctatccgatcagggctgattgaagacaaaagtgcgcggcttttcgcaggctgcggcattgttgaagattcagatccgcaatcagaatatgaagaaacacaaattaaactaaagccgatgatctctgctttaggaggtgaaaggctttgacaaacccgattacacattatatcggaagctttattgatgaattcgctctatcgggtgtcaccgacgcagttgtttgcccggggtcgaggtcaactcccttggcggttttggcggcggcccacccggatattcaagtccatatacagattgatgaacgatccgcaggttttttcgcactcggtcttgcaaaagcccgccagcgtccggtcatgctgatttgtacgtcaggaacggcggcggctaacttctatccggccgtgattgaagctcattattcaagagtgcctcttattgtcctgactgctgaccggcctcatgaattgagggaagtgggggcgcctcaggcgattaaccagcattttctgttcggtaactttgttaagtttttcacagactcggctctgcctgaggaaaatcctcaaatgctgagctatatcagaacattggccggcagagccgtaagtgaagccgggaagcgtccgatggggccagtccatatcaatgtgccgctcagagagcctttgatgccggatttatcagccggaccttttgaaagaatgagaaaggggcggcacgtctcagtcacaacagggattcagtcagctgctcaagactctctctgtcatattacagagcgtctcgcgggtaccgaaagaggtatgatcgtctgcggcgaaattcacggtgaagcagaaaagcagcaaatcatcgctcttgccgagatgcttcagttcccgattttggctgatccgctttcaaacctccgaaacggggagcatgataagacgctgattattgatgcttatgactcgtttttaaaagatgaagaaataaaagaggcgctgcgcccggacgctgtgatccgcttcggcccgatgccggtttccaaaccgctctttttatggctcagagatgatcctgccattgagcagtttatcgtcgatgaagacggaggatggagagatcccacccaggccggcgcgcatatgattcattgccatccgtctgtgtttttggaagcggtccgttcagctgaaaccggaaaacggccgtccggatggcttgaaaaatggcagtttgtcaatgagcggttccggagtcatttacaggccgcgagcatggatgatttatcatttgaaggaaatgtatatcgtcagcttcagcaccttgtccctgaaggcagttcgatttttgtcggcaacagcatgccgattcgcgacgtggatacgttctttgaaaaacaagatcgttccttccgtgtttatgccaaccgcggcgctaacggaattgacggagttgtctcctcggctatgggactgtgtgaaggtacaaaagctcctgtcacgcttgtcattggagatttatcgttttaccatgatttaaacgggctgttagcggctaaaaaacttggaattccgcttacggttattttaataaacaatgatggcggcgggattttctcgtttttgccgcaggcatctgataagactcattttgaagaactgttcggtacgccgacgggtcttgatttccggcatgccgccgcactgtacggcgggacgtatacttgccctgagacatgggaagcatttaaggatgcgtatcagccgcaggcggacaagcccggacttcatataatcgagctgaaaacagatcggacatcaagagttcaattccatcgcgatctgctgcaggccgcagtgcgggaagtgaaaaaagaatggaaactgtaacagttaaaacggccgacggcgtatgctatcgtgctgctgatagcggacacgaatcatctgaagctattgtttgtctgcatggatttacgggcagcaaagaatcatggatgtttttacgcggcatgtttcccggcgaacgaatggtgatgattgactgcctgggtcacggggagacagacgcgcctgtgcaagcggcaaggtacagtgcgagccggcaggttgcggaccttgccgccgtttttgatcaattaaaacttcacaaagtgaaacttattggttattctatggggggaagacttgcgtattcctttgcacaggcatttccgcatcgggtgtcagcgcttgttttggaaagtacaaccccgggcctcagcacgcttcaggaacgcaaaaagcggattcagtcagaccggaagcttgctgactttatattgcgggaaggtataacatcgtttgtcgattattgggagggcattccgttgtttgccacgcagctttctctgccggacagcgtaaaggcgtccatccgtgccggcaggatgaaaaataatccgtccggacttgcaggcagcctgctcggaatggggacgggctcacagccttcctggtgggaggcattacaccgcatcaaagcacccgttctgctcatatgcggtgaatgggatgaaaagttttgcgctattaatcaaaaggtgcataacctgctcccatcaagtaaaatagaggttgtcaaacaggcggggcacacggtacatgtggaacagccgcgaatttttggtaagatagtaagtgagtttttatacggcttgtaaagcataaagaaaatagcttttcggccggactcaggcaaaaatgaaggaggtcatatcaatggctgcagaatggaaaagtgaacgtcagtacgatgaaatcctgtacgagacgtataacggtattgcaaaaataacaattaaccgcccggaggtacataacgcatttactcctaagacggtatcagaaatgattgacgcgtttgcttgtgcgcgtgatgactccaatattggtgtcatcgttcttgcgggagcgggagataaagcattctgttcaggcggagaccaaaaagtccgcggtcacggcggatatgtcggagacgatcagatcccgcgtctgaatgtgcttgatcttcagcgtttgatccgcgttattcctaaaccggtcgtagcgatggtatcaggctatgccatcggcggaggccatgtgcttcatatcgtctgtgatttaacgattgcggccgataacgcgattttcggccaaaccggaccgaaagtgggaagctttgatgccggttacggctcaggttacctggcgcgtatcgtcggacataagaaagcccgtgaaatttggtacctgtgccgtcaatacaacgcgcaggaagcgctcgacatggggcttgtcaatacggttgtcccattagagaaacttgaagaggaaacaattaaatggtgtgaagaaatgcttgagaaaagccctacagcccttcgtttccttaaagcggcatttaacgcagatacagacggcctcgccggaattcagcaatttgcaggagatgcaacgcttctttattacacgactgacgaagcgaaagaaggccgcgattcctttaaagagaaacgcagtcccgatttcggtcaattccctcgttttccgtgatcagatgacactacgaaacagcttgagccgctctggtccaagctgttttcttttcaaaaacagtacttttacctcggagatgataacatgctgacagaacagccgaattggctcattcaaagggctcagctgacaccagagagaatcgctctcatatttgaaaacaaacagatgacattcagagaattatatcatgcttctaaacaaatggccgcgcggctgtccaaatactgctcgcttaaaaaaggagaccgggccgcgattttgctttctaacagaccggaaatggtttatgccgttcacgcctgcttcttattaggggcggaagctgtgctgttaaatacgaagctctcaaaacaggaacggttgtttcagctcgaagattcacaggcaaagcttttattgacggaggacggtttttgccgcgaagattatgaatctgcagtcgccgctgcggacgtggacgagctgcaggccaaagccgcgggagacattgaacctgaagcttatgtaacgcttgatgatacggcgactcttatgtatacgtcaggaacaacgggaagaccgaagggggtgcagcagactttcggtaatcattattccagcgctgtatcgtctgcgctgaatctgggggtcacggagcgggaccgctggcttattgcgctgccgctgtttcatatcagcggtctgtctgcgctgtttaagtcggtcatttacggcatgcctgtcgtgcttcatcaaaaattttctgtcactgatgtgctggacagcatcagctcccatcaggtcacgatcatttcagcggtgcagaccatgctttcgggcctgcttgcggaaactgaacaatgtcctgaatcactgcgctgcattctgcttggcgggggtccggcaccgctgccgctcctcgaagaatgccgcaggaaacaatttccggtattccaatcttacggcttgactgaaacctgctcacagattgtcacgctttctccggaattcagcatggacaagctcggctcggccggtaaaccgctgttttcatgcgaaattagaattgaaaaagacggaaacccttgtgcgccgtttgaacacggtgaaattacggtgaaaggcccgaatgtaatgaaagggtattaccatcgtgacgacgcaaaccaggccgcttttcataatggatggtttaaaacgggcgatcttggctatttggatgatgaagggtttttatacgtgctggacaggcggtcggacctcattatttcaggcggagaaaacatctacccggcagaagtggaagcggcgctgcttgcccatccggctgtagcggaggccggtgtttcgggagccgaagatccgaagtgggggaaagtgccgcatgcttttctcgtgctgacttcttctgtcagttctgaggagctgaccgccttttgccgtgagcggcttgcaaaatataaaataccggctgcttttttcgaggttgacgggctcccgcggaacgcgtccaataaactgatgagacatcggctgaatgagcttcgtaaaggagaattgtcatgattaagattgaaaaaatcaccctttatcatgtaagtatgaggctgaaaaaaccgtttaaaacaagtattgaaacgctgcaggatcgtaaatttttgatcgtggaagcgatcgatgaaaccgggagaaccggctggggggaggtatcggcgttttcttctccgtggtatacagaagaaacgattcagacatgcgcgcatatgctgagagattttttcatcccaaatgtcgtaggccgcgagtttttccatccgtcagaagtgcctgacagtctcgcgcgtttcaaaggaaaccgcatggcaaaagcggggcttgaatcagccgtgtgggatctatatgccaagaaaaaggggatatctctcgcagaagccttagggggcaaaagagataaagtgcccgccggcgtggcggtgggtctggcttcggctgatgagatgcttcgggaaattgagcaatacgtaaaagaaggttatcaacgtataaaaataaaaattcagcccggccatgacgttgatctggtcagatccatccgcagccgttttccgaacgtaccgctgatggcggatgccaactcggcatatgaactgaaagacatcagcaggctgaaagagttggatgaattccagctcatgatgatagaacagccgcttcaggcagatgatattgtcgatcaccgccacctgcagaaacacttgagaaccgcggtatgccttgatgaaagcatatgctcatatgatgacgcaaggcgggcgattgagcttgggagctgtaaaatcattaacataaaaccggcgcgtgtaggaggcctgacagaggctttaaaaatacatgacttatgcagagagcatcacatgccggtttggtgcggcggaatgtttgaaaccggcatttcgagagcgcagacagtcgcgcttgcttcgctgccgcaatttacgataccgggtgatatttcctcatcagaccgatactgggaggaggatattgtcactcccgacatacgtatcgaagagggattcatctctgttccggacggtcccggactgggtgttgaagtcaatcaggaaataatgagaaaatacgtcacccaaatggacgtttttacgacaaacaactgataaaaagacatttcagcgagttgagctgcctgtatgctgctgttatattgaaattgttcattatcaccccttcccccgtttgaaccggctgtatcagccggtttttttaataggcggatgcgatgatttttttattcttcaaacagtgtcggctttacatcgcaggtgttgctttctggctgggcaaacatgtacatcttgataaaaaattctgtgcttgtcatgaatgcgatactgatcgtaccgtctgccgcctatatttgccgacgaaccgcctttctgccatgcttctcatccgcgcgattttccccggctcaagggctgatttcaaaaaggcttgcggcacggaaatgaaaaagagctgtataaaacagctcttttcttttataaatcatgcggtttaaaggttttgcaatccgtttcttcacttttttcagcggtttcgcctgtatggctgaccacataaatcgcgtcggccgtgcatttgtttcctctgccccaatatgaacagttattgacttcacacagaattttttggtccatgctggctcccctccaagataaaaggtacgccattagtatgagccgccctgatttttgttattcctcctggcggatataacgtctgtctttcataaagagcttccagaagaaataaaacccgggaaacaaaatgatgaaagcgacgatatacgtcataaacagcgccctgaaggttgccggctccgtaaatcctgacatgaccgtaatatccggataaatcatataaggaagatgcgcccgtccgtatgcatagcttgccagaaagtattgaagcgcaatggcgatcatggcgattctcggtttgccgaggttgcggccgaagcgcttattcggcaaaaacagagccacgccggcaatgataaatgtgatgacagacagaatgagccatgtcttgtctttcatcatccccgtatacagccagccggcttcagagcgtaatgtcagcataatgaagaaggcgaaaagaagcgacagcggccctgttagtaaagagctccgtctgtagatgcggtacgcatgctcctcttccgcaacatttgaaaaatcggccagaagcagtgaagataaaaataaagtgcttaaaatggcaaagccgataaacgcatacgcattaaggcttgtaaagacatttgccaaattcagttgatacactccgcccgtcttctcaataaaccctccgtgtgtgaccggaaggaccaaaatcagcacagcgggaataatgaaacctgaaattccggagatatatctcatgatttttctttccttcgccgtattggagaagacgagaaagccgctgcggatggctaagagcagcaaaataatacttcccgggatcaataaaacggttcccagcacgaaggttgcccctggaaagaagctgaatagggcgacaacgatcgcgacgataaagacgttggtcacttcccatgtcggggacaaataacggttggcgatgtttgtcgcctttgtttgttctctatttaaataaatcatcgaccaaaagccggctccgaagtccatcgttgccatgaccgcgtagataaacacgaagccccatacgattgatatcgcaatgagagcatccatggtaatgtccattttaattcagccctttctatagttaggattccgcagcttttacatcctcctcaacgggatgtttgcggaaataataaagcagcacataaatgactgcggctgccaaaatggcgtaaaccactgtaaacaggatgaacagcaaaccgattgaaccggttgtcgtgacgacatcagacgttttcaggagatggtaaatcacccatggctgccgccccgtacaagcgaatatccacccgaattcaattccgatcagactgagcggtcctgcggttaaaaataaaatcaaaagccaagtcggaaagctgtctttctttaaaatttttctccacacgatgccgatgattgagtacaaaatgagcagcattccgatgccgaccattccgttaaacagtgtatggatgaataaaggcggccactcgtctttcggaaacgcgttcaatcctttgacgacggtatcaaagctgtttgcagccaaaaagcttaaagcccacggcacttctatcgcccattttactttttcttcttttgcatcagtaaaacccccgatcgcaagcggagcgtgtgatctagtttcaaacagcccttctgcgcccgcaagcttctcaggctggtattcgtaaagaagctgggctgactcgtgaccgtttaaagaggcaataatggagaatatcccgccgatcgttaaggcgagcagcagcgcttttcggtgaaagcggtatacctgctcctgttttctcgttctcagcattttataagccgcaactgacgcaacgataaatgcaccggtcatgaaagccgtcagtacgacatggcccgcggtggtgaaaaagcttggattaaaaaacgctgcccaaggttcgacgtcagtgattttgccgtttaaaattttaaagccggccggcgttccttcaaatgcgtgaacatttgtgattaagacggcagatgccgcggcgccgatcaaaacgaaaataacggcaatgatgcgcatcgccggagtcagccggtcagcggcgtagacataaatggacataaacagcgcttcgataaagaaagcataaatttcaatctgaaacgggagtgacatcaccctgccgatgacttccataaatccgggccacaaaagggcaagctgtgtacccgcgatcgttccggtcggtatcgccacgccgagcagaacagcctgcgccttcgtccaccgttttgccataatggcataatgcggatcttttgttttttggtaaatcaattcagccattaaaatcatcagaggcaagccgacaccaagcgtcgcaaaaataatatgaaagcccatggttgtaccgaacaggcttctggctaatactaaatcatccacgatcataaaccgcctttctaaattaccgttttatgtaatgtggctatattatttgctgaagcgattagattattcttccgattccatatatgtgcagggtttagaaatcaagggatcagggcatatatgattgacaagcggatatttaaggcttaaaataaaacgtaattattacgatttgagaaagggagatcagcatgaaaaaagatattcatccggataaccatcaagtgatttttcaagatgtgaacagcggctatcgctttttaagccattctacgaaaacgtcagcggaaacggcagagtgggaagacggaaaaacatacccgctgattaaagtggaagtcagctcagatacccatccgttttatacaggccgccaaaagttcaacgaaaaaggcgggagagtcgaacagttcaataaaaaatacaatatgggaaaataagacaagcccaatggggtttgtcttatttattgagcactttgtcatctcgtgcggggagtgacgaaatgacccgtcttatgttatattgtgaataaaaaagcagaaaggaaacaccaagatgagtcttctaaatgatatcatgcaatttaatgagcagttcactaaaaacaaagattatgaaaaataccaaacatctaaattcccggataaaaaaatggcgattttgtcctgtatggacacacgtcttgtagaattgcttccgcatgcgatgaatatgcgaaacggcgatgtgaaaattattaaaagtgccggcgcgcttgtcgcccacccgttcggaagtatcatgcgcagccttttagtggccgtatacgaattaaacgccgatgaagtctgcgttatcggccaccatgattgcggcatgagcaaaatcaacagcgaggatatgctcgataaaattatcgaccgcggtattccgaaagagcggattgacatgctgaagcactcaggagttgatcttgatcaatggctgaaaagctttgattcagtagaagcgagtgttacagacagcgtaaacgtcattaaacaccatccgctattccctgacaatgtgccggtgcacggtctggtgattgatcctgaaaccggtaaacttgatctggtgatcgacggctaccagcatatggactaatgtttttcttttttgtccggtacgggatcaacaccgcccggatgaaaagggtggcactttaaaatccgcttcagtgtcagccatccgccttttaatgcgccgtgagtcttgacggcttcgattccgtactgcgaacacgtcggataaaagcggcatgacggcggcgtcagcggagagatgaacttctggtatccgcggatgaaagcaatcattatggttttcatcaaaaaaccacctttctgatgctagtatagaaaaaaaatttcagattgaaaagcttccgtcacaattcttatcggaaaactgtgttataatggatgcatattctgaaaaaaagggagtgccattatgccttcagtagaaagttttgagcttgaccataatgcggttgtggctccgtatgtaagacattgcggagtgcataaagtcggaacagacggcgtcgtgaataagtttgacattcgcttctgccagccgaacaaacaggcgatgaagccggataccattcatacgcttgagcacttgcttgcgtttacgattcgcacacattctgagaaatacgatcacttcgacatcatagatatctcaccgatgggctgccagacaggctattatcttgttgtcagcggcgagccgacagcggaagaaattgtagacctgcttgacgctacgctgaaagaagccatcgatattacggagattccggcggccaacgaaaaacagtgcggccaggcgaaacttcatgatttagaaggcgcgaaacgtctgatgcgtttctggctgtcacaggataaagaagatttgctgaaagtgttcggataaaaaacaggcctttttgctgacatgcaaaaaggcttttttacatatttctaaaaaatgtcacaccttatgtgtaagcgtttgctaaaatagaagcaaacatgaaggagtgatgggatgaaacgggctgtattggcaggtatgtgcggtatggtatttctattatcttcctgcgggggcaattcggacaaaacctccgcggatgaagagcctaaagcgcttgaggtcaagcttacaggaccggaaacgactgcaccgcatgaaaaagcggaatacaaggcggaagttttttacggcggcaagcgtgtcacggatgcggatgaagtcatgtttgaagtatggaaagaaggaaaaaaaggcagcagcaaaacaagcaaggccaaggaggaaaaaggggcgtatcacctgcggactgaatttgatgaagagggtgtgtataccgttcaatcccacgtaacggcaaaacagcagcataatatgccgactgtaaaagtgcgtgtcggggatgctgaagctgccgatgattcctccggccatgaggaacagacgcatcatcattaaggattttttttatccgtcaagccttttgatgcgtcctccggcgggtcaatcgtatgttttacattataagctcttacagtcgaccagatggataaaagcagcacggcgagcacgataagaaagccgaagctcagaagaagcagcatgaaatccctcctttttaacaaatcataacatattttccatccgtaaaatcaagggctaaaaatttatgttttaacacacgatatatagggtatatcaatagtaaaccaaaggaggaagataggcatgtcagaaaaactattggatgcagtcaataagcaagttgcaaactggacggtcatgtatgtgaaattacataattatcattggtacgtcaaagggaaggactttttcacattgcatgaaaagttcgaggagctgtataacgaaacggctacatatattgatgatctggcagaacgtctgctggcattaaacggcaagccgatcggcacaatgacggaatcattgaagacagcgtctgtaaaagaagcggaaggcaatgagagcgcagaacaaatggtacagaacatttatgatgatttcactgtcattgcggaagagctgaaaagcggcatggatctcgcagatgaggtaggagacgaaacgaccggtgatatgctgcttgccattcaccagaatatcgaaaaacataactggatgctgaaagcgtatttgggataatcaacaagggaagaccggggctataaagcactcggtcttttatttggctgccgaagagaggtgttgtccatttttctgaaaaatccagtccgttccattcacttttcatagaataatgtaaggccgtttctgtgaaaggatgttggatcaagtgggcaaagactttggcatcttttcgttttttgcagtgatcgtgtcggcagcggggtttttcttcggaggttttcagtattcgtttctgattttgctatcggtcatggcgattgagtttatcagtacaagcttaaaagaatctcttttgcagcagctgagcgcaagaaagctttttgcgcggctggtcaaaaaaatcgtgaccctggcattagtctcagtttgccatttttttgaccagctgcttcataccgaaggcgccatccgtaatttggctatcatgttttatatcttatacgaatcggttcagatcgtgattacggcaagctcgctgggcataccggttccgcaggtgctcgtcgacctattggatactttgaaaaataaattcaagcgcaaaccgtaacatttgcttcaaaggaggctatactagcgggtatgatggttttcctctgaatttttgataaagggcttccgaacaaacgcaactgtggtatgatgtatggaagatatgaaggaacggattagagggataaacatgtacgagtttaaagactattatcagaacactgttcagctctcctttgaacaccagcctttttcagacagcccgaagcacgtatgggtcatatgccgatatggagataagtggcttttgactgagcacgaagaccgggggtttgaatttccgggcggaaaagtggagccgatggaatgtgcggaggaagcggccctgcgcgaggtgaaagaagaaaccggcgccgcggtaagacatctgaagtacgtcggacagtataaagttctcggcagggaaaaggtaatcgtgaagaatatttattttgccgatattgaaaagcttgaacaacaggctgactattttgaaacaaaggggccggtgctgttcagcgaactgccggagaatctcccgcgaaataaaaaattcagtttcattatgaaagattcggtgcttccgatcagtctgaaaaagctgaaagaggacggcgtatttcaatcataaaaacgaagacccggcgtttacgcacgggtcttttttaaatttttcctttcgtccattttctttctaacagttcgactccctgatacatcaatgtcgcaaaaatcgcgatgatcagaaggcttaagaacacaagagtgaaattgaagacctggaatccgtaaatgatcatgtagcccagacctttttcggaaacgagaaactcgccgacgatgacaccgacccaggataaaccgacgttcactttaagcgcggaaataatcgcgggggcgcatgccggcagaatgacttctttaaacatgatgcttcttttcgctccgaaggttttcatcaccttaatatagttttcatccacttcctgaaaagccgtaaagacgacgattgtcgtgataatgacactgatgactgctcccatggcgacaatgcttgtgaaattcggtccgagtgccacgatgagaatcggtccgagtgcgaccttcggcatcgcgtttaaaatgacgaggtacgggtctaaaacccgggcgagcctgtttgaccaccataacaaagcggcgaggcatgtgccgaggagcgtgccgagcaaaaagccgagaacggtttctcctaaggttacgccgatgtgcgccgcaagggatccgtccgcaatcttttcaactaaaagcctgcaaacggcggagggtgagctgaagattaacggatcgatccagcccgccctgctcgatatttcccagccggcaaaaaatacgatgaaaatggcggcctgatacgcacggatccggagcttttctttttggtgtcttttcttaaactgctgatgaagctgttcaatcgtgccgctgctgtttttcaagggaattcagctccttccatatggtttgaaacagcggctgaaaggccggatcctgacgcgcgtcaaacggatctaaagccgcgagctccttaggcacggtgaatatttggtggatggtgcccggctgattcgaaaataaatagatcgtatcgctcatggcgatggcttcaccgatatcgtgggtgacgagcacggcggttttttgaaaatcctttaatgttctgaagacaaggttttccaaagaaagcttcgtttgaaagtccagcgcggaaaacggttcatcaaggagcagcagtcccgggtccggtgcaagagttctggcaagtgccgcccgctgccgcatcccgcctgacagctctttcgggtatttcttttcaacgccgattaatccgagcttaggcagaaggctgagaacttcagctcttttttcttctgttaatgtttttgaaatgtgtaaaccgagcagcacgttttcctcaattgatttccaaggaaataaataatcctgctgaagcatataaccgatttggtgttctttatggttcggcacgcttccttcaatcagcacccggccttgcgcaggggtgataagaccggccagaatggacaggagtgttgtttttccgcatccgctcggtccgagaaaggagatgaaatcccctttttcaatctgaaaatgtatatctttcacggcggttgtcttttctttcagcgagaaataagtatgtgttacatgatccacatgtaaaaaagacattcatgttcctcctattgttctgaggtgacttttttggcgatttttgtgttgacgagtttgctgtacggaatgtgtttcggaagctctccggcctcatccataatagattgaagctgttcccattcatccttttgcagaactgggtctgcagagaatgacttttgttttttatatcgctctattgatgtttcgataatggccggatcggtatcggcaaattccttctgaatcgtttttgcgatgtctttggccggatggctttccacccattgctgggcgcgatagatggcgcgggtgaatttttccgccgtcttttcattggttttcaaataactttcttttgccataaaggttgtgtatggcatttggccggaagcttctccgaaggatgcgacgatatggccgatgccttctttttcaaattgggatgccgtcggttcaaacagctgcacataatcacccgttccggatgcgaatgcgttggaaatattggcgaaatcaatgttttgaacgaggttaatgtcttttttcggctctatgtgattctttttcaggacgtactcaccggccatttggggcatgccgccttttcgctggccgagaaatgtttttccttttaaatcgctccatttgaatgatttctcatccttccgtgacacgagaaatgtgccgtccgtctgcgtcagctgcgcgaagttgatgaccggatcttttgctccctgcgcctccacgtaaatggatgtttcagaaccgaccagcgcgatatcagacccgtttgacaaaagcgatgtcattgttttgtctccgccccatgttgtttgaagtgacacttggagcccttcttttttaaagaaaccttttgcttcagcgacatacagaggcgtatagaagatggagtgtgtgacttccgccacctttacctttgtcagactttcttcctgtctgcaagccggaagaatgagcaggaaaaaggcgcatatgacaaaaacgcagcccgttttgagccatttgttcacggtgtaacctccttgttttaagcgttaaaataaccttttctgctttacatatcgtatgatgggtataaaaaatgtgtgagtgcccatattcaggttgggaaagaataaaaaaactgatgatataaggaggccattgttttgctggcagaaaagaaaaggttcccgtctccgagtccgcatatccgcctctttgaggtatgctatgagtcagaagggctgaaggtaaaggggcttcttgccgagcctgcggcgccgggaacatatgacggttttttatatttgcgcggcggcatgaaaaatgtcggcatggtacgccccggaagaatcgttcaattcgcttcccaaggctttgtcgtgtttgcgccctattacagaggcaaccagggcggcgagggaaatgaagattttgcgggagaggacagagaggacgcgttttccgctttccgcctgcttcgggagcatccgaacgtcagagaagggcgggtgcatattttcggattttcccggggcggaatcatggggcttttgaccgcgattgaaatggggcatcaagcggcttcgctcgtatcatggggcggtgtgagcgatatggtgcttacttatgaagagcggaaggatatgcggcggatgatgaagcgggtgatcggaggcacgccgaaaaaggtgccggatgaatacagatggcgttcgccgtttgaaaaagcagaccgcattcaggcccctgtgctgctcatccatggagagaatgatgagaatgtttcgatcgaacacgcccgaatgatcgaggacaagctgaaagaggcggggaaaccggtggaaacttggtattacagcggttttacgcattattttccgccgcaggaaaacagacgcattgtccggcggctggcggaatggatgaagacacggtaagatgcctgatttatgatatgataataaagaataagagaatgaaaggggattttcattttgggaatgcctgttgaatttaataccatgattgtgacaaaaggcaatgaaaaacggatagaggaaaatatctttttattggagaaagagggctaccgcgtctatcctcttgatattccgatggacgtgcgcaaaacgaaaaccggcgagaaatccggcaccggcgaggtccaaaagctcgaatgggcgaacggccggacaagcattacatacagactcacgtcgctccattcgacaaactgaaaaaacaaaagccgagggcataaacgcccttggcttttttgattacacgagaggtccgccggctttggcaatcgagtccgcatgggaaaactttttaaagttttctttaaactcattggccaaaaacagcgctttttcgttgtatgcttgtttatcgctccatgtgttttcaggctgaagaacttcatccggaacgcccggaacatgaacgggactgcgcaggccgaaaatgctgtctgccgtcatgtcagtctggttcagtctgccttcaatagcggccttgaccatcgctcttgtatacgaaagtttcatccgttctccgactccgtaccctccgccggtccagcctgtgttgaccaggaagacttgaacgccgtgttcgtcgattttatgcccgagcatttcggcatatacatgcgccggaagcggaaggaacggtgaaccgaagcacgtcgagaaagtcgtttgcggagatgtcacgccgcgctcggttcccgcgagtttactggtgtacccgcttaagaagtgatacatcgcctgttccttcgtcagtttgctgatcggaggaagcacgccgaatgcgtccgccgttaaaaagacgatcgcctgcggatggccggcaatgctcggctgcacgatattgccgatcatctcaatcggatatgcggctcttgtgttttccgtgtagaaggaattgtcgtaatccgcttcacccgttttttcatcaagcacgacattctcaagaacagacccgaagcggatcgcacgaaaaatctgcggttctttttcctcgctcagattgatacatttagcgtaacatccgccttcaatgttgaaaacgccggaatctgaccagccgtgctcgtcatcgccgatcagtttgcggtccgcatcggctgaaagcgtcgttttccctgtgccggaaaggccgaaaaacagggcgacatcgcctttttcaccgacattggctgagcagtgcatcggcagtatatcctgctgcggaagcaggaagttcataatggagaatattgattttttcatttctccggcgtattcggtgccgccgattaaaatgacgcgcttttcgaaagagacaatgataaatgtttccgaatgcgtgccgtccgtctccggatctgctttaaaatgcggagctgagagaatggtgaaaggctgcgcttgcgtgtctctttcatccgtctccggtctgataaacagctggcgcgcgaataaattgtgccacgcaaattcatttacgaccgtaatcgggagtctgtatttttcatccgctcccgcgaatccttcaaacacaaacagttcatcccgctgttttaagtagctgacgactttggcgtacagcttttcaaacgcctcttcagaaatgggctgattcaccgcgccccaatcaatttgattttctgtgctttgttcacggacgataaatttatctttaggtgaccggcctgtatatgcgccggtggtggcgcgtacggcgcccgttgatgtcagcgttccttcatttcggctgatcactttttcggtaagttttggagccgataaattatgatgcacattcggacttgcaagtaatgcttgaagatctgcggttaaatcaactaatttcataaaaaccttcctttgccggtttatttgtatttcgctgaatgtggaattagtataacatatatctgaaaatagtctatactatttgcggttttttgtttgtgtttttccattgcttcccgaaataaaggcgcgtaatcgctttaattcatattgacactttccgcccttttacgataagatatttcattgagcggatactcttatcccgagctggcggagggacaggcccgatgaagcccagcaaccggtttctctgtaaaaaagcaggtgaaaacactgtgggaaaccaaggtgctaacctgatgcaaggtttaatattttccttgagcgataagagtgaaaggcacacagaccaaaccctttcctcgagtggaaaaggtttttttatttcataaaatatgccaattaacattctctgatatagtatgacattgtattaagagggagcgagttccgtatcatatgaaaaggtcttgcaaaagatcttttttcaggaggaaaagtgaatgagtaaaaaccgtcgactatttacatctgaatctgttactgagggtcatccggacaaaatctgtgaccaaatttctgacagtatcttagatgagattttaaaaaatgacccgaacgcgcgcgtggcctgcgaaacatctgtaacgacaggacttgtgctggtaagcggagagattactacatcaacatacgttgacattccgaaaacagtccgtgaaacgattaaagaaatcggctacacacgcgccaaatatggatttgatgcggagacttgcgctgttttaacatcaattgatgaacagtctgcggatatcgcaatgggtgtcgatcaggctcttgaagcgcgtgaaggcacaatgagcgatgctgaaatcgaagcaatcggagcgggagaccaaggcctgatgttcggttatgcgtgtaacgaaacgaaagagcttatgccgcttccgatctctttggcgcataaattagcccgccgtttgagcgaagtccgcaaagaagacattcttccgtaccttcgccctgacggcaaaacgcaagttaccgttgaatatgatgaaaacaacaagccggtccgcatcgacgcgatcgtcatttcaactcagcaccacccggaaattacgcttgagcagattcagcgcaatctgaaagagcatgtcattaatcctgtcgtgcctgaggaactgatcgatgaagagacaaaatacttcatcaatcctacgggacgtttcgtaatcggcggacctcaaggtgatgcgggtctgaccggccgtaaaatcatcgttgacacatacggcggatatgcacgccacggcggcggcgcattctccggtaaggatgcgacgaaggtagaccgttctgcggcatacgctgcgagatacgtagcgaaaaacatcgtggcagcaggtcttgctgattcttgtgaagtgcagcttgcatacgcaatcggcgtggcacagcctgtttctatttccatcaatacatttgatacaggaaaagcttctgaagaaaaactgatcgaagtcgtacggaataacttcgacctgagacctgccggcattattaaaatgcttgatttgcgccgcccgatctataagcagacagctgcttacggccacttcggacgtcatgatgtggatcttccttgggagcgtactgacaaggcggatgcgcttcgcaaagaagcactaggagaataattttatagccgcttacttaagcggctttccctttttgtagatgctgccatgcttattttttacatagcgtgaaaccaatggcgtaacaaagcgtctataaaaagggggtccaattagaaaattacacttatggaggctatactatgtgtggatttgtcggtgtttttaataagcatccattaactcaaaccgcagatcaagaagagctaatcaaacaaatgaaccaaatgatcgttcaccgcggtcctgacagcgatgggtattatcatgacgagcacgtcggattcggcttcagacggctcagtattattgacgtagaaaacggcggacagcctttatcatatgaagacgaaaaatattggatcatttttaacggcgaaatctataactacattgaattgagagaagagcttgaagcgaaaggctacactttcaatacagattccgataccgaagtgctccttgcgacataccgtcattataaagaagaagctgcttcaaagcttcgcggaatgtttgcgtttttaatctggaacaaagctgaccgcgtcatgtacggcgcgagagacccgttcggcattaaaccgctgtattacacaaccatcggggacaaagtatattttgcatctgaaagaaaaagtttaatggccgctcaaaacggcattgatcttgatacagcttctttacagcaatatatgtctttccaattcgttcctgaaccgagcacgcttgacgctgaagtgaaaaaagtcgagccgggcagccagtttacgatccgtccggaaggcgacatcgcgtttaaaacatatttcaaagcgaacttcaagcctgttcagtctgatgaagataaattggtgaaagaagtcagagacgcaatctttgactctgtcaaagtccacatgagaagtgacgtgcctgtcggttcgtttctatccggcggtattgactcttcttttatcgtctcagttgcgaaagaatttcacccgagccttaaaacattttccgtcggttttgagcagcagggcttcagtgaggttgacgtagcgaaggaaacggctgccgcgctcggaattgaaaacatcagcaaagtcatttctcctgaggagtatatgaacgagcttccgaaaatcgtctggcactttgatgacccgcttgcagatccggcggcgattcctttgtactttgtcgcgaaagaagcgaaaaaacatgtaacggtcgcgttatccggggaaggcgcggacgagctgttcggcgggtacaatatttaccgcgaaccgctttcgcttaaaccgtttgaacgcattccgtccggtctgaaaaaaatgcttcttcatgtggcgtccgtcatgcctgaaggaatgagagggaaaagcctcttagtccgcggctgcacaccgcttgaggagcgttatatcggtaatgcgaagatttttgaagagcccgtgaaaaaacagctgctcaaacattacaatccagagctttcataccgtgatgtcacgaagccgtactttacggaaagccgttcatacagcgacattaataaaatgcagtatgttgacatccatacgtggatgcgcggcgacatcctgttaaaggctgacaaaatgacgatggccaactcattggaactgcgcgtgccgttccttgataaagtcgtgtttgacgtggcttctaaaattccggatgaactgaaaacgaaaaacggcacgacgaaataccttctgcgcaaagctgctgaaggggtagtgcctgatcatgtgcttaaccgcaaaaaactcggcttccctgtgccgatccgccactggctgaaaaatgaaatgaacgaatgggttcgcaacatcattcgtgaaagtgaaacagatgcttatattgaaaaggattatgtccttcagcttctggaagatcattgtgccgacagagcggacaacagccgcaaaatctggaccgtgctgatcttcatgatctggcacagcatcaatgttgaaaaaagactggtgccggaagagctgaatcatcagccgaaagaagtcatttttgtttaatccaaaaggctttcgatgttatcgaaagccttttttctattgttttttgtaaaccgtctattccgctctgttttcgacaaagtattacgcaatattcagaaaaaggttataataggactaatcgggtagattccggaaagtgttttctggctatttcgtctcggtttgtgtttctttgtcaaaatcagggggagggagagttatgcaaaacaaagaaaaaacgcttcaccgcggcttggaagagcggcatatctcgcttatgtcgttgggcgccgcgataggagtcgggctgtttctcgggtcggcttctgccataaagcttgccggaccggggattttagccgcttacgcctgcagcgggctgattatgttttttattatgcgggcattaggggaaatggcgattcaaaagcctgtagccggctcattcagccggtatgccagagattatctcggtccgcttgccgggtttttaacaggctggaattattggtttttatgggttgttacctgcatggcggaaatcaccgcggtcggcatttatatgggctactggttccctgacgtgccgtcatggatctgggcgctttgtgcactcgtcattatgacggctgtcaactttctggcggtcaaagcgtacggtgagcttgaattctggtttgcgctcattaaagtcttggcgattctgtcaatgatcgcgatcggtctggtgatgatcggattcggcctcggaaacggaggcgttgcgctcggaatcagcaatttatggagccacggcggctttttcccgaatgggattaaaggggtgctgctgtcgcttcaaatggtcatgtttgcctatctcgggattgagctgattggtgtcacagccggtgaggtcaaaaatccggaaaaatcactggcgcgggccatagatactgttttttggcgcattctcattttttacgtcggagctttgtttgtcattatgtcaatttatccgtggcaggaaatcggttcaggcggaagcccgtttgttttgacatttgaaaaaatcggaatacccgctgcagccggaatcattaattttgtcgtattgacggcggctctttcttcctgcaacagcgggatcttcagcacggggcgcatgctgttcaatctggcggaacaaaatgaagcgcctaaagcatacggtacggtcacaaaaggcggtgtgccgggaaaagcggtattggtttcagcgggcgcgttatgcatcggcgttttgctgaactacgtggtgccggcaaaagtgtttacgtgggtgacgagcattgcgacgttcggggcgatttggacatggtcgattattttgctttcccaaatgaaataccgtaaaagcttacagccggaacaacggaaaaaactgaaatataaaatgcctttatatcccttttcctcatatatctcattggcatttctcgcttttgtcgttgtgctgatggcttttgatgcagagacccgggtggccgtcattatcggtcctgtctggttcggcatattattagccgcttattacgggaaaggtttccataaaagaaaagacataggtctggaaaacggacagacattcgccgaaaaagcgtaaaaaaagagcccgggacatgggctctttttttcataggatcgggccggcgggggaagaataaaacaaattcctgaacattttgcttctgtttcctgacaatcgggagaatgcaaatggtttttacttaaataatattttgaaaaatggtacagtagtaaaacaaagctgatctatttttatttctcttgcagtgttttatagtatcggcctttttcaacatattccgttctgattctttccatgtcccgtatgtcttcttctgtcagccggcggataacctttgcgggccggccgaacgcaagacagccgggaggaatggttttgcccggaggaacgagacttccggcgccgataaacgcgccttctccgatttccgccccgtcaagaatgacggagcccataccgattaaagcattctttttgatgattgcgctgtgcagtgtaacctgatggccgatcgtgacgtcatcttcaataagaagcgggcggttcggactttgatgcagacagctcaagtcttgtatgctgactctttttccgatccttgtcggcgcgacatccccccggatgacggctgagaaccaaatgcttgattgttctccgatcacgacgtcgcccgtaatgacggcgttatccgcaatgaacgcttcaggatgtatgtcaggcgtaaattgtttataagggtagattatcatgtctcatccttctttctctaaatttatgtaagaggtgaactgcatgtggacttggaaagcagacaggcccgtcggtaccattgtcattatccacggggcaagcgaataccacggacgttataaatggctcgttgaaatgtggagatcttccggatataacgtggtgatgggcgatttgcccggtcagggaacgtcgacccgcgccagagggcatattcgctctttccaagaatacattgatgaagtagatatatggattgataaagcgagaacgcttgaagcgcccgttttccttttgggccacagcatgggcggactgattgcgatagaatggtttaagcagcagagaaatccccgcattacggcactcattttatcatcaccttgtctgggtctgcaaataaaagtcaataaagtccttgattttgcgtctaaaggactgaacgtcctcgctccgtccctcagagtggattccggtttatcacctgatatggcaacgaggaatgcggatatgattgaagcggatcaaaacgattctttatatgtcacgaaggtatccgtaagatggtacagagagcttttaaaaaccattgatgccgctatggtgccgactgatgcgtttttaaaggtgccgcttttgcttatgcagggcggtgatgacaaaatcgtcgataaaatgaaggtccgcaaatggttttccggtgtggcttcccataataaatcgtaccgggaatgggaagggctctatcatgaaatttttaatgaaccggaaagagaaactgtgtttaaggcggcaaaagcctttacagatcagtatatttgaattcgctgggggtgcatatgttgacagtaccggaacatccttttaaccttatggcaaaagtgtatcgggaaatttttccgctcgttcatcaggaattgaacatgtggcgggaaaaatcagattccattaaaaataccgaactgcggcagcaggcggccgcaagtatccgcgataagtcgtttcattgtgaaggcggcggcattttagccctgctttcgggagaacagaaacaaaaatgcgtgcaatttatcatcgcgtatcagacaatcagtgattatctggacaatctgtgcgaccgcagcacctcgcttgatcccgaggacttccgcatgcttcatctctccatgcgtgacgcgctgacggtcggtgccgaggtgcggccgtactatcagtacagagacgagcaggatgacggcggttatcttcatgagctggtcagaacatgccagcgggtgctcgggtcaatagaacattacggtatcattaaaccttatttgcttgagctgtgtgattattattgcgaccttcaggttcataagcatgtcgttgagcatgaacgcgttccgaggcttaaaggctggtttgagcagtaccggtcacagcttccggaaatggagtggtttgagttctcggcctgcgccggatcgacgttaggcattttctgtctcgttgcttactcattccagcctgattttaacgaacataccgctgagaaaatccgcagcagttattttccgtacatacaagggctgcatatactgcttgattatttaattgaccaggaagaggatctgcttgaaggcgatctgaatttctgtacgtattatcagtctcatgaagaaatgatgcagagactgcagcattttattgaaaaagcggatgaacatttgcaaggcattccgcatgaaaattttcaccggctgatcaacagagggctgctcggcgtctatttatccgatgacaaagtcgccggccaaaaagaaatgggccgcctcgcgcgaaagctgatcagggctagcggaaaaacgtcatttttcttttatatcaacggaagagcctaccgcaaatttcagaagatggcttggacgaaaagttcgtaatgggtgaactgcgcctctcgtgtaaatcatgacggcgcagttttttatttatgacgtgaagtatgaaatgaaacattgtttgcgcctgcagaatatgatactttaattttatgaaaaaattaaagtatttagcggtcatagcattactttccatttccggaggctgctccgtcatccatgcttccgccggctatcatcctgtattgatagcgcacaggggctcttctgcgattgagccggaacatacagctttgtcttatgcgcgtgccattaaagacaaagcagattatattgagatagacttacggaagacgaaggacggccatctgattgcaattcacgataaaacggtagatcggacaacagatggtaaagggatgacagatgatctgtctttggctcagattaagaaactgaatgcgggaaaaggagaaaagattttaacattagaagaaatcatacagaaattcggacaaactgccaattactatattgagacaagagaaagcaacggcagcctggtgatggaaaagaaactgattgacatattacaaaaacataagctgatttccagccataaagcagtcattgagtcttttagcgggaagagcttaaagaaagttcgatctatggataaaaaagttcctcttgtccgattattaaaagataacgaggctgaggagataaatgataagcagctgcaaaccatcagaacgtatgctgatacagtcgggctcaacgccaaattggcaaatgaagcagtcgtgaagcgtattcatcacaataagatgaaagtgcacgtgttttttgataaggaagacgagcatacgctgacgcctattatgctgaaacaaaaagcagatggtgtctttacaaacaatcccgcttatacacgcggcgtgctgcaacaaaacagtaaataaaaagagacatgcgcattttacgctgtctctttttttaacggtttcttttttgccgcaaggtgcattgcgaatttgccgatcagcccgatgacaaaaaatgcagcaaaccaccagtaataggtttttgcgaactcaaatcctaaatgtcttgataaaatgatgacgaacatcacatagggaacacttgaaaatatgatgcgaagaatattcaaactgccgctcctcccagatgttacacttaaaagatgaacttttttccattatttcatagtaattgatttttcagaaaaagtaaacacaaaaagaatcggcccgcttatgtcaggccgattctttatttgccggcagatttcttttcaatcgctataataaacggcgggtcgtttcgctggttgagaaagccgtagctcagcacgcgcgctttttcctgatcaagattgctgcagtactccagtaatgcacttttttccgtcttgccttcaggatgcccgtggtacacaacgagaacgatcagcccgttctccttcagcagttcaaggagctgttcgatcgcggaaatggttgagtggccgtttgtcgtaatgcttttatcgccgccgggcagatagccgagattaaacacggcgcaagccacacgaccgtgcgcatcctcaggcagcgatgcctttatttgatcatggctcttatggtgaagcgtgacgcgcggactgaagtcggcaccgagccgctccttcgttttagcgagtgcgtccgcttgaatatcaaaggcatggacatgtcctgtttcaccgacaaggctggccaggaaatatgtatcatgtccgttgcccatcgtcgcgtcaaccgtgatatcaccttcctgtgcggcggacttcagcaattctttactgaaagggaggatgtgcatcaaggtcatagggcggtctcctccccgatctttctgaagagctttccttgatagcttccccgtgtttccagctctttttgaatggcgcccagtacttcccacttattgacgctccacatcggtccgaccattaattcgatcggcccgtctcccgtaatgcggtgaacgatcatttccgggggaatgatttcgagctgatcacatacaagacttacatattcttcttgagaaaggaactccagctttcctttttcatattgcttcaccatcggtgtgccttttaataagtgaagcaggtgaattttaatgccttggacatccaaatcagcgacggctttggccgtctccatcatcatgtccctgttttcaagcggaagcccgttaatgatatgggaacaaacgcggatgccgtgttttctcagtttattgacaccctcaacatagcagtcaaaatcatgggcgcggttgatcagaagggcggtccgctcatgcacggtctgcagcccgagttcaacccacaaataggtccgctcattcagttcggccaaatattccacgacatcgtccggcaggcagtccggacgggtcgcgatcgacatgccgacaacgccgtcaagcttgaggacggattcgaatttttctcgcagctcctctaccggagcatgcgtattcgtgaacgcttggaaatatgcgatatatttgccgtctttccacttttcgtgcatgcggtttttgatatcgtgaaattgcgtgagtaagtcatcggcccgattgccggcaaaatcgccggagcccgccgcgctgcagaatgtgcagcctccgtgtgcaaccgtgccgtcccgattcgggcagtcaaaaccgccgtcaagcgcgactttaaacactttatgcccgaaatgctcccgcagatgataatttaatgtatggtaccgtttttccgtatttgaataaggaaaagggttattctcgttcaatgttcaaaaagcctccctcacatcagatgcatcctaaaattgtagcatgaatgatggagcggaacaatgaaacaattatggaacggtcaggacgtaatatctacctggtttttctgttgttgttttaaacgttttggagaaatatcactgaacaatgcaaaaataattcctaaaataagaattacactgcctactttgaatgtattattaaaactgtcacttattttttcattatataaatttgaaatttttttctggatagccataacttccttcttttgaatattgaagcttttttgtactttttctttatacggatccggggttatagagagaatttcttcctcttttttgtttaattcagcaatacttttgcttcgatcgaaacctttactgtctgaatgctttaagtgagttattatctcgttctttgcatttttatcaaaaacctgattgctttccacaattttaatggcttcttttttcgcagtagctgtgtgatcatttatattcattgtaagcacagatgtaagtatggcaattcctagcgcttgtccaactgtccgcatcatattaagaatacctgaggcaattcctactttctcaggaggaataagccgtatccctgaactcattgctggtcctattacaagccctaaagctaagccggtcaaacataacagaataattactgacgttatagaactgtcgtatcgtatgtatccatataaatatgttgtgattgttaaaccgagcatacctagacccgaaagccaaatgcccccgagtttatcagatagctttccagaaagtacagaggtaaacatagatgatagagctaatgtagaaacaattaaccccgcttctaattcagtttttcccattaaattagtgaggagtaaagtaataataagggtaccgcttgttaatccaaggccctgcataaagagggtgaaagaactgaaactaaacgtacgtatcttcagcatggataagggaatcatcgggtttttaattttagattcaataaagaaaaacaaacagaataataatacagagattacaaaaagagagataattaatggtgatgaccagcctaagtcagatacttttgcaaaaccaaaggttaaacagaagagagctccggataaaataagaatccccatgtaatcaatttttttactcactgtttcatcataactctcagtaataaaaaatgctgctaaaaaaagagaaatcagacctaaaggaatatttatgaagaagatagcttgccaattaaaattttcagttaataatcctccaagtacaggtcctaatgtagctgctaatcctgagaaagcaccccagattccaatgatcattccttttttattttgaggtacgatagctaaagctataggcattgtaacaggtacaatgaaagcagcagataatccctgaatcactctaattgtgacaagcatttcaattgaagtgctcaaacatgcaataactgatgtcaaaataaaaagtgctaatccaaacataaaagctttttttcttccaaaatggtctgccagctttgatgcacctactaataaaaccgcaaaagctaaagtataacctgtagccacccatgctacttgagaaaggttactcgaaaaataattcagcatcttaggtaaggcgatatttactatagtggtgtccattactgaaatgaatgtacctaataataatgcagataacatgattatttttttgaaattcaatatacttacatctccttttagaaaactatctaattaaaactttgacgtatgtctaaaaacataataagaaaaaaaatcatttgtgtcaatattattcataatatgtttattagacccaatatattataaaataacaaatgtattaagataaccattactttaaatctattaaaattccaaattaatactttacaaatagacaataattccttattattatttaaaagttggtttttcatggttttttttgaaaaaggaggagctaatgacccatccaattaaacttttttgcattccgcatgctggaggattgtcaagtatttatagtgaatggagtaactcagttggaccagaaattgaactaatacctgttgaactagcaggaagaggctctagattttctgaaaatccctacaaaacaataaatcaggctatagatgatattacagaattaatattaagaaaatgtgataataagtgctatgcgatttacggccatagtatgggtgcatatatatcgtatgaagtaatacttaaattaatgaaggttacagataatcttcctcagcatttatttgtatctggaaaaggcgcaccttatttaactaaggaaacatttataagcggtcttcctgataaacaagttattcaatggttaaacaaattagggggaattcccaaggaacttatcgagaattacgaactaatgaaactatttcttccagtaataaggaatgattataaactaatagaaagttacaaccacaacatcaaaaaaaaattatcaaatgttacgttaactgttttaacgggcaagtttgacgaatcaataactataggagaagttgaagggtggaaagaatattcagcaaaggaggttgatgtataccagattagcggagggcatttttttattaatgaatccgttacagaagttatatcaattattaaagataaattattggtttaagtttagtatggaggtttttaacgtgaaaaaatacttttgggctcctcatgttcactggagaaatgaaaataaccatattattattaatgattttcaatttagagggaaagtagttgaactttttcctgatatttattttcattttcaaaaaggcatttctttaagcgaaatatatgttatttttaaagactttaatccaaagattttaaaaatgtttctaaaagatttaatacgtaatagagttttagtttgcaatgtaagcacaccgacagagcttttcgaaacgcaaaacaaatttgtttatcaagaatatgacgatgagttttttttatacaaagaaaatatagaatcttataagaagaaacaattaactaggtttatgtcaaagaatactcttcaatcaattgatttggaggaatgctcagatttgccctctttagttcaaaatagaaaaagtactaggaattttgatactagtaaaatgatgaatttttctaagtttaatcggttgttaaatgtctttaaacagtctccaattcaagagggtattaaatatttctacccaagtgcaggaggactgtatcctgtcaacatatatttgtatattaaagatgggagagtcgaaaatcttgaggaagggatatatttttataatcctcacagccactctatcaatttacttaatagagtaaaactggctgaaaaaaaatatcattattttataaaccacagtgcatttaatacttcgaatttctctatctttttcacccttgattgtgatgtaatcatgcccaaatataagggtgcggggtattactatggtattcttgaatgtggtgttatgtcagctacattggctaatatagcagaatattttgatgttggatcgtgctccataggagaaatagacttcgataaaattaaagatgaatttaatttgaatagcaatgaaatctatttacattcggtagaggtaggactaaagaataaggaggtaaatcattgattaataacacgctagtaacgagtaataaatttaaagagatttctaactttataataaaaaaaattcgtgaattaagtaaagatgattcagttgatttaagaactaatatttttgattatcaaatatcttctattaatatattaaaattacttggagccattgaagatacatataatataaatattgaattttatgattatattgacaacccagatgtactgtcattttgtcaagttgtttatgaaaagtttcagttattagataataaaaaagagtataatatattacatttattaagcgatgaagaaaatgcctataaagaatttgatcttacaaatgttcaagttgcttatttatctggaagagacaagcaatttgaactggggggaacttccacccatgcttttgtagaatttgaggctgaactagatattgaaaaattcaataaaagtgtacaagctgtgatagagcgtcaacacatgctacgtgcagtttttttatcaaatggtaagcaaaaaatacttgaacacgtaccgaattataaattagctattcaagatgtgagttatcttaaaaaatcagaccaagaagacaaaatattagaagcaagaaaagtaactaacgaacgaatcttcgatccataccaatggccattgtttgaatttaaagctttaaaaatcagtgataaactatatagaatattctttgatatcgatatgttaatagcagatggagctagtatccagcttttatttaaagagatatctgaattgtacaatggaaagattcaagagcctttagaagtatcctatagagattatatgttagcttataacaaattaaagggaaatcataaatatcaggatgacaaggaatattggttaaataaacttaaaagttttccttcaacaccagctctgccagtaaaagtagatttagcatgtataaaaaaacctacttttaaaagaaagaaaaaaattattgagaaaagaaattggaatcaatttgtgaatttatgctctcggaagaatattaggcctagtatactacttttgtctatttattcaaaagtgttgtctaaatggagtaatcagcaaaatattgcgttaaacactacattatttaaaagaagacctttgcataagcagattaataacgttataggcgattttacagaaattatgatatttgatgtatgcttcaataatttaaatcatttttgggaagaagtaaaaaatattcaggataacttctttaaatgcttatcacataatgattttgatggaatagagtttaccagagaatactgtgaatttaatgatatagatagaaggaaagctgtttttccgattgtttttacaagtatgttatttgaaaatgaattaaactatttagattctctaggagtttttatagagagtatcagccagacatcacaagtttatctggatcatcaagtgatagagctcaatgatggagtcatgcttagttgggactatgtttcagaggcttttgaaaatgatgtaattgagtcaatgtttgaggaatatacccacattattgaccaattaacgtccggtgagatgatgtcttctgaagatacagcactggaacaagcaattactgattataatcaaactgagaaggccatcaagccggatactttatatcacttgtttgcgagacaaacaataaaaacacctgagaatattgcgattgagtgtcaaggaagagcagttacctatcaagagttacaagtcatgtccaaccgcatatctagttttttggaagagaagggaattcagccaaatgagtatgttggggttattgttgatcgtgagatcgagacaatcgccagtatcctcgcagtgttaaaaattggagctgcctatatcccaattaatccggaatttccaaaagaaaggcaatcatatattctgaaagatggtgattgtaaagttgtattaacagctgaactggcaaaaactattgtgtcaagctataaagagtctaaaagagaaagtgtggcagtgccggaacaaatagcttatgcgatatacacttcaggaagtacgggaaaacctaaaggtgtaattataaagaatgaggctgtaactaatactatattagacatcaatgaaaaatacagtgtgaatgaaacagaccggtttatcggattatcatctatgtcctttgatttatcaatatatgatatttttggtgctttttctgcaggagcaacattagtaatgatcgaagatcagagagatattaaaaagattcatgacatcgtaaaagaggaaaaaattacagtctggaactccgttcccatgatcatggaaatgttagtaaactatatggatgaaacagaaaacaaatctaacgctggagttattaactatgacgagcttcctgaattaagactggtattattaagcggggattggatacctgttcatcttcctgagaggattaaggatcacttcgttgaaagtgaagtcataagcttaggcggggctactgaagcgtctatttggtcgatttattatccaattaaaacagtcaaggctgaatggaccagcattccttacggttatccattatcaaatcaaacttactatgttttaaactatgaaaatgatccttgtccaatcggagtgaaaggtgaactttacatagggggaaaaggtgtagcagacggctatttaaatgataaagaaaaaactgaagcgtcatttattgatcacccagatttcggaagaatttatcgtacgggggatatgggggtcttgacgcaagagggttatattgagtttttgggacggaaagatcatcagattaaagttcgtggatatcgcgtggagttaggtgaaatagaaagtgtaatattagagcaccgacaggtgagaaatgcggtagtcattaatcaaaaggatgccagaaatcaagatgtgttatatgcgtacgtaacggggcaccaatccttaccgccaactgatctgaaagagtttttaagcctgaaagtgccggaatatatgatacctagctatatcgtacagattgaagaggttcctttaacaagtaacggaaaagttgatcgtaaaaaactactggctctagacgttacagatcaagcatcgattggaaggaaaatcaaagagcctcgaacagaaattgagagagatttagttggtatctggaaaagcgttctgaaaacaaatgaaatcagcatagatgacaacttttttgaattaggcggcaattccatattgatcattaatttaattactgctattgaggatcgtttatttattaaattagattttaaaaattttatatccaacagtaccattgagaaactagcaaaagttatcagtgtctctgaaagaaaaagtaaaacaaatagtaatgtgatggaaattcaagctgatatcaagcataaaaatacggaattcgatttaactaacgttcaaatggcttatctaatgggaagagataaacaatttgaacttggtggcacctcaacgcatgcttatttagaaattgagactgagctgaatattgaaaaactcaacaaaagtttacaaaaagtaatagatcatcaagacatgctgcgcgcggtcattcttccgaatggaaggcaaaagattcttcaacaagtccctcagtatgaaatatctgtacaggatattagtcaattaagtgatatagaacaagagaagaaaattgcagaagaaagagacagaacatcacatcatatctttaatccaaatgagtggcctttatttgaattcaaagccttgaaaattcaaggggataaacatagattatttttcgacatcgatatgttaatagctgatggagccagcatccagcttttatttaaacagatatctgaattgtataatggaaaagatgaaatggtaccattggaaataagctatagagattatatgttagcataccaaaaagtcaagaccactcaaaaatatgaaaatgataaagcctattggttaagtcagctcgaagattttccaaaagcacctgcggtgccattaaaagaaagattagatgcaataagcaagccaactttcaaaagaaaatctaaaataattgacaagcttctatgggaaacactttgtaaaaaagctgcaagctataatattacacctgcaataatattatttacagcttacgcaaaagtgttgtcgaagtggagtaaccaacaaaacttagcggtaaatacaacagtatttaatagacagcctctccataaacaagttaatgatataataggtgattttacatcgctgattatgttaaaagcgagttttgagaaaaaaatgaacttttgggaggaggcaaaaaaggttcaggttactttcatggaagcgcttgaacatagagactatgatggagttgaatttataagagaatatgctagatataataatttaaagcacaaaagtgcgacaatgccagtagtgttcaccagtatgttatttggaaacatgtttaatcttaataataatgatctattgaatattggtgagttaaaaatggcagtcagccagacatcacaagtttatctggatcatcaagtgatagagctcaatgatggagtcatgcttagttgggactatgtttcagaggcttttgaaaatgatgtaattgagtcaatgtttgaggagtatacccacattattgaccaattaacgtccggtgagatgatgtcttctgaagatacagcactggaacaagcaattactgattataatcaaactgagaaggccatcaagccggatactttatatcacttgtttgcgagacaaacaataaaaacacctgagaatattgcgattgagtgtcaaggaagagcagttacctatcaagagttacaagttatgtccaaccgcatatctagtttattggaagagaagggaattcagccaaatgagtatgttggggttattgttgatcgtgagatcgagacaatcgccagtatcctcgcagtgttaaaaattggagctgcttatatcccaattaatccggaatttccaaaagaaagacaatcatatattgtgaaagatggtaattgtaaagttgtattaacagctgaactggtaaaaactattgtgtcaagctataaagagtctaaaagagaaagtgtggcagtgccggaacaaatagcttatgcgatatacacttcaggaagtacgggaaaacctaaaggtgtaattataaagaatgaggctgtaattaatactatattagacatcaatgaaaaatacagtgtgaatgaaacagaccggtttatcggattatcatctatgtcctttgatttatcaatatatgatatttttggtgctttttctgcaggagcaacattagtaatgatcgaagatcagagagatattaaaaagattcatgacatcgtaaaagaggaaaaaattacagtctggaactccgttcccatgatcatggaaatgttagtaaactatatggatgaaacagaaaacaaatctaacgctggagttattaactatgacgagcttcctgaattaagactggtattattaagcggggattggatacctgttcatcttcctgagaggattaaggatcacttcgttgaaagtgaagtcataagcttaggcggggctactgaagcgtctatttggtcgatttattatccaattaaaacagtcaaggctgaatggaccagcattccttacggttatccattatcaaatcaaacttactatgttttaaactatgaaaatgacccttgtccaatcggagtgaaaggtgaacttttcatagggggaaaaggtgtagcagaaggctatttaaatgataaagaaaaaactgaagcgtcatttattgatcacccagatttcggaagaatttatcgtacgggggatatgggggtcttgacgcaagagggttatattgagtttttgggacggaaagatcatcagattaaagttcgtggatatcgcgtggagttaggtgaaatagaaagtgtaatattagagcaccgacaggtgagaaatgcggtagtcattaatcaaaaggatgccagaaatcaagatgtgttatatgcgtacgtagcggggcaccaatccttaccgccaactgatctgaaagagtttttaagcctgaaagtgccggaatatatgatacctagctatatcgtacagattgaagaggttcctttaacaagtaacggaaaagttgatcgtaaaaaactactggctctagacgttacagatcaagcatcgattggaaggaaaatcaaagagcctcgaacagaaattgagagagatttagttggtatctggaaaagcgttctgaaaacaaatgaaatcagcatagatgacaacttttttgaattaggcggcaattccatattgatcattaatttaattactgctattgaggatcgtttatttattaaattagattttaaaaattttatatccaacagtaccattgagaaactagcaaaagttatcagtgtctctgaaagaaaaagtaaaacaaatagtaatgtgatggaaattcaagctgatatcaagcataaaaatacggaattcgatttaactaacgttcaaatggcttatctaatgggaagagataaacaatttgaacttggtggcacctcaacgcatgcttatttagaaattgagactgagctgaatattgaaaaactcaacaaaagtttacaaaaagtaatagatcatcaagacatgctgcgcgcggtcattcttccgaatggaaggcaaaagattcttcaacaagtccctcagtatgaaatatctgtacaggatattagtcaattaagtgatatagaacaagagaagaaaattgcagaagaaagagacagaacatcacatcatatctttaatccaaatgagtggcctttatttgaattcaaagccttgaaaattcaaggggataaacatagattatttttcgacatcgatatgttaatagctgatggagccagcatccagcttttatttaaacagatatctgaattgtataatggaaaagatgaaatggtaccattggaaataagctatagagattatatgttagcataccaaaaagtcaagaccactcaaaaatatgaaaatgataaagcctattggttaagtcagctcgaagattttccaaaagcacctgcggtgccattaaaagaaagattagatgcaataagcaagccaactttcaaaagaaaatctaaaataattgacaagcttctatgggaaacactttgtaaaaaagctgcaagctataatattacacctgcaataatattatttacagcttacgcaaaagtgttgtcgaagtggagtaaccaacaaaacttagcggtaaatacaacagtatttaatagacagcctctccataaacaagttaatgatataataggtgattttacatcgctgattatgttaaaagcgagttttgagaaaaaaatgaacttttgggaggaggcaaaaaaggttcaggttactttcatggaagcgcttgaacatagagactatgatggagttgaatttataagagaatatgctagatataataatttaaagcacaaaagtgcgacaatgccagtagtgttcaccagtatgttatttggaaacatgtttaatcttaataataatgatctattgaatattggtgagttaaaaatggcagtcagccagacatcacaagtttatctggatcatcaagtgatagagctcaatgatggagtcatgcttagttgggactatgtttcagaggcttttgaaaatgatgtaattgagtcaatgtttgaggagtatacccacattattgaccaattaacgtccggtgagatgatgtcttctgaagatacagcactggaacaagcaattactgattataatcaaactgagaaggccatcaagccggatactttatatcacttgtttgcgagacaaacaataaaaacacctgagaatattgcgattgagtgtcaaggaagagcagttacctatcaagagttacaagttatgtccaaccgcatatctagtttattggaagagaagggaattcagccaaatgagtatgttggggttattgttgatcgtgagatcgagacaatcgccagtatcctcgcagtgttaaaaattggagctgcttatatcccaattaatccggaatttccaaaagaaagacaatcatatattgtgaaagatggtaattgtaaagttgtattaacagctgaactggtaaaaactattgtgtcaagctataaagagtctaaaagagaaagtgtggcagtgccggaacaaatagcttatgcgatatacacttcaggaagtacgggaaaacctaaaggtgtaattataaagaatgaggctgtaattaatactatattagacatcaatgaaaaatacagtgtgaatgaaacagaccggtttatcggattatcatctatgtcctttgatttatcaatatatgatatttttggtgctttttctgcaggagcaacattagtaatgatcgaagatcagagagatattaaaaagattcatgacatcgtaaaagaggaaaaaattacagtctggaactccgttcccatgatcatggaaatgttagtaaactatatggatgaaacagaaaacaaatctaacgctggagttattaactatgacgagcttcctgaattaagactggtattattaagcggggattggatacctgttcatcttcctgagaggattaaggatcacttcgttgaaagtgaagtcataagcttaggcggggctactgaagcgtctatttggtcgatttattatccaattaaaacagtcaaggctgaatggaccagcattccttacggttatccattatcaaatcaaacttactatgttttaaactatgaaaatgatccttgtccaatcggagtgaaaggtgaactttacatagggggaaaaggtgtagcagaaggctatttaaatgataaagaaaaaactgaagcgtcatttattgatcacccagatttcggaagaatttatcgtacgggggatatgggggtcttgacgcaagagggttatattgagtttttgggacggaaagatcatcagattaaagttcgtggatatcgcgtggagttaggtgaaatagaaagtgtaatattagagcaccgacaggtgagaaatgcggtagtcattaatcaaaaggatgccagaaatcaagatgtgttatatgcgtacgtagcggggcaccaatccttaccgccaactgatctgaaagagtttttaagcctgaaagtgccggaatatatgatacctagctatatcgtacagattgaagaggttcctttaacaagtaacggaaaagttgatcgtaaaaaactactggctctagacgttacagatcaagcatcgattggaaggaaaatcaaagagcctcgaacagaaattgagagagatttagttggtatctggaaaagcgttctgaaaacaaatgaaatcagcatagatgacaacttttttgaattaggcggtaattcaatttcactttcaaatatatacactaaaatagaaaaaaaatattcagatttgaatatagttgatttattcaagtatcaaaaaattagtgaattatcacattttattagtgttatgaaagaggagaataagaatttaaaattaaaatcagtaaaattgcctccaaaaattcttgctaatagaaaagataataaaaatgaaaagacaataattttagaaaaacagttaaaaattaagtttaataacttagaagtaagtaataaagtaataaatacatttttatatttatttagcaactttatagaaaacgatgaatattatgtatcccttttaaaatcaagctatatagatttggaaaaaataaatatagaagagtatagtgatttaaccgagtttataaaaaacatagaggaaaataagataaaaagaaagacagtatccaaaataaatttgcgtagcaacctgggtttagagagagataatgctcatattaatgttttaataatagataaacaaaaagtcgaaaataatattagcgaatcttatgaatttatatttagttatttagttaatgataacaatataaatctcgaattaatatttaaaaataataagttgcgggaaatctcagtagaaaagttttttaatacttatataaatattatttctgatttaatataaaagtagaaagagcacctttttcaggtgctctaaaaaggtgagtgatgtttttatgtttaatgtttttgaacaactagataaaaacgaaattaagttcactaaaaaagaaatagaaaccaaagtcgctataattggaataagctcgagattacctaaatcaaataactttagagatttttggggtaatttggttaatggagttgattgtattggagaaatagatagccagagaaaaaaggattgcgattatttttttgagaataaaggtatagatacgaaaaaaataaactatcagcaaatggcttttgtaaacgatgtggataaatttgattacaaatattttaatattccttatcaagaagcatctttgatggaccctcgtcaaagattatttttagagtcaagtattcatgcattattggatgcaggatacccagaaaaaaaagttaacggaagtaatattggtgtatacgttggtagcagtaatagtgattcaatatataattatgataaggttatatatgattcatctattcgaaatcctgtaagtattgttaataatcttccttcaatgattgctagtcgggtttcttattatttagatttaaaaggacctagtatgactctagatacttcttgttcctcctctcttgtagcagttcacgaagcatgtaaagctataattcataatgaatgtgagatggctattgcagggggatgtaacttaaatcttattcctcttcagcatgaagtaaggctcggcattgaatcgagtacttttagaacgagggcttatgacaatgactcagatggaacaggatttggagaaggtattattacatttattttaaaacctttattcagtgctttaagagataatgataacatttattctgtgatagaaggaagtagtgtaagtaatcaagggttttcttttggggttgctactccaagcattgaaggacaggaaaaccttatttcggaaaatattagcaagtccaatatagatatcaatgacatttcgtttatagaagggcatggaacaggaactgcaattggagatgtaatagagatagaagcaatcaatcgtgctttctccgaaattaacaaaaaaaattatttgcctatggggtctgtaaaaaataatataggtcatttattaagtgcatccggagctgctggattattaaaaagcgtgcttgcattaaaaaatcaaatgtttcccccaacgataaattataatactcctaataaaaatatagattttagtaactcacctgtgtttattaatactgagaaagtagagttacataaaaaagaattgctgttaggatgtataagttcttttggtatgagcggaactaattgccatatgattatttctaattacgacaaaaaaagaactattccaaatgaggattgtttagagcctcaaatattcacattttctgcaaacgatttggatactttaacttttctattaagtgatttatataattttcttcttgaagagaatctgatgctactaagtgatattggatatacattgaattgcagaagagatcatttagcaaatagagtggctataatagcatcatgtaaggaagatttattagaaaaattaaaagaagcattaaataagattcaacaaggaaataaaattattaaagatagtgaaatttattttaacgttaatgatataacctctaatgtaaaagaattgtctttaggagatgagtctcaagacgatttaaggcaaatttgcagaaggtatattatgggcggtgaaataagttgggacatgtattataaagaatataatcaagttgtttctttgcctgttttcacctttaagaaaactcggtgctggtatagtgaagaaaaaatagactttgtcttaaatgacgatgttattttaaatgaaaaagaaaaaattgtagttgaaacatgggcaaaactatttggcctaaataaaatagacttttctcaagatatttaccaagtaggtggagattccttgagcttggtaagtatgtatcatgaaatagagtcgaaaatacccaatatttcattagaagtgtttatagaaaaagaaacattaaatgaaattctagattacgttaatgaagcatcacaaaaaaataatgaaacagatgaattaatttttgaaaagaataattgtaaagtttataaattctcgaatggaataaataattcaaacacgtatttaatttgtaatcgtcataagagtatccttattgattctggagttagtttagaatatttaacagagttctgtgaaagattgaaattgaatcgaatagattatattgttcttacacatgctcactttgatcatacttattctgcaaatgaaataaaagaaaaattcaattgtaatttcataattcatgaaagagaaataaattttgcgagagatatcataaataatggacttgcccttcttgggaaaagttttacgtttgaaagcgatgatatcctaattaaagataaatatacagttttaaacattggagatattagcctcaagataattctcagtccgggtcatacaacaggtagcgtatgcgtgctttatgacaattttttatttacaggtgatactatttttaaagataaaaaagcaaaacccgataaaaaaacaggaaatgaagattatttaaagaaatccatttcttatttaattaataatactgaagataatactataatatgccctggtcatgaagatattacaacaatttcatttgtgaaaaaaagaatttatgatttttgattttattttatgaggtgtttagatgtgaagttggtgattagtgacagtgtttcggatttttttgataagatttcttctctgcttttcttaaaacacgaaggattcttcaaagattatagcattaaaatgggtataaaattagataatgaatattttgtattactagatgatcttaaaagaataaaagagttagatagtgagtttttaaatttttattttggcagcttttgcgactacaaagatgttaggaatgcaaatattttttgtttagccacaaccttttttaaaataccacaaatttatacgaaagatttttttgaaattattgattatttgtctgcagttacagaagaagagataagaaaaaatattttagagtctctaatttatttacaaggagatcttaaaactgaaacatctacccaacagtatttaaatgatagggaaagtttatttgagctacttaataatctaaatatcaagcccgaatacaagtggatcatatttaaggtaatgaaatctcctaaaacttatgtagatcaattttgcaataaattaatgttggtgaatggttatcttaacgaggcgatttataatttaattaaatttagagatgagtggatgaatcaattaaaaaacataaatatggattttccaaaaaagataatcagtacgttaaaaggtaaggaatacttatcttgtaattatattaatatatatccaacacttttaccttacactgcaactattacgaaaagtgaagataacatttatgttggactggggtataaagttgatgaaatttttgaaaatacattggagaaagcagagattaatcacatcattgattttttgaagcttttatcggataaaagtaagttcaagatattaatcttacttagtcataaaaaaatgtatgctaatgagattgctgaacagctaaatttaaccaacgcaacgatttcacaccatatgagaattttgacattgcaaggtttagttgagagtgcgagaaatcaaaataaaacatactattatcttaattcttctaaatttcattctcttctaaatggattattagggaaatttaagtctgctttaattttagagaaagaggagtaaaattaagtgtataaaacagtttatgattttatagttgatgctgaaaatcgagatgataaaggaattacatttataaatggatccgataatgaagtatatatttcttatgctcaattatttgaaaaatccagaaaagtattaggtgttttacaaaaaaagggtttaagaaagaaagatgaactaattatacaaattgaggataatgaacaatttattaaagttttttgggcgtgcatattaggtggaatcatacctattcctttaagtgtggggtataatgaagagcataaacaaaaaatacttcgtatatggagtattcttaataatccttattgtatttctgatcaaagaacattacattcacttgagaaagttgcggatgcagaaacttattcatcaattgtaaaacaatcaatttatttagatgaaattaagaattctaatgaagtgggtgaattaatttcccctaaaccagaagaaattgcttttattcaattctcttctggtacaactggagatcctaaaggtgtaatattaacacataaaaatcttattaccaatatatcagcattaaatgaggcttgggagacatcgaaatccgattcctcactaagctggatgcctttaactcatgatatgggcctcattgctattcacttagcatcaacgtataaaaaaattcaacaatatataattccaacctccgtttttatccgaagaccgactttgtggttattgaaaacacatcaacaccgtgttacacaattatactcccctaactttggatataagtttttgttggataactataaaaaaaatcaaatctataactgggatttaacttgtgttagattattagctaatggagcagaaccaatttctacttctttgtgccagagatttttagaagaaatgaaacaattcggattaaaatatgaaaccttaaatactgtatatggtttagctgaggctacagttgctgttagtgtcccaaaattaggaaacccttttgttcctgtaacccttaatagggaagctttagaagtaggtcaaaaaattcaaaaaactgttgaagaaaaaaagggattaacttttgttgaagttggcccggctgtacgtcattgttctttccgtatatgtgattctaataattacgttctggatgatgattttataggtcatgtgcaaataaagggggaaaacgtaacgtctgggtattacaataatgaatctgctaccaaagacgctataactgcagatggatggttaaatacaggagaccttgggtttatacataataatagtttggttattaccggaagaacaaaggatatcattataaagaatggccaaaattattattcacatgatatagagagagtagcagagaatgtaaaggatattgaattaggtaatgttgtggcatgcggggtcccgaatgaaacaaaggcggaagaagatcttgtgatatttgtaaaatgtaagcaaagttacgatattacaacagcagagaaggaattgaaaagagaattaacaaaacaattgggtttgaatgtacatcaagttatacctgttaggaaaattttcaaaactacaagcggtaaagtgcaacgttctaaaatgaaggatttttataaagagttaattctgtcttgattaagttttacatttaatcgtattttataccatctctgtcttgtgtatgaattacctgatatttcttgtgagaatttatttggaataagaaatactattgatatgacattatcaataggaggactgtttaatggcaacaagacaatcagtagatgaacatctccaaagaagcgaacaggcgtatgaatttgcgaatgagcaatttatgaccgcttcaaaacaagagcattataatgataatgagtacagtgaagcgcaaatgatgcttgaaaacgcggtgaatgaattaaacaagctgtcattatctgcgaatgatcagcaaagagagcagctttatcgaatgagattgcagctgcagaccttgcaaaacaatatgattttgcagcgtaattttgattactgaccgcgccgtttcaaatggttcagcaaacctgccggaatcccggcgggtttttttgtatttttttaaaaaaagaattgacaatagggcggagtgtgtttattgtattacgtgtactacttgatgtaatacacataaaacactcaaaaaatgaaatcgacatataaatgttaagcatagggaaggggaactttcatgaaaaacaaaagatccgtaaaacaagatgtgcctcttattatcgccgcctcggttttggcaagcagtctgtttgtcgttcttgtcatcatcggttttcaatggcagaacatttaaagaaagagagcagctcgtaaaagaaagaagggaagtaaatgattcaaatcgatccgagaagctcaactccgatttatgagcagattatacagcaactgaaagagctttgtttaaaagggatcatgaagccgggggataaacttccttctgtcagggaattggcaacgatcattatcgccaatccgaacacagtcagcaaagcgtacaaggagctcgaacgcgatggtgtcattgaaacgctgaggggaagaggaacgtatatatcggagaatgcaaaaacgacattggttgaagggaagatgacgatgataaaagagcaattgaaacagctcatcatcgatgcccattacgcgggagttgagctggagaagctgcaggaatggataaaggaaatcagcgctgatgtgaaaggaggcaaggatcatgattgaattgcggaatctctcaaaaacgatagacggtaaagaagtgctcaaggatatttcgctcaccatcggaaaaggggaaattttcgggctgctcgggcgaaacggatcagggaaaacaacactgctccggctcattcagcagattctgctgccggatcaagggacggttttatttaatcaggtggaaataaagcggcatccgaaagtaaaacagaacatcatttatatgcctgttgaaaatcctttttatgacaagtatacatataaacagcttgttgcaattgtaagcagaatctatccgaattttgatgtgacttacgccaatgagctgatgaacaggtacggcattccggaaacgaagaaataccgtgaattatcgacaggcctgaaaaaacagcttgcgctcgtccttgcctttgcttcacgcccggctcttatccttttggatgaaccgacggacggaattgacgccgtaacgcgtcatgacgtgctgcagcttatggtggatgaagtggctgaacgggaaacgagcattctgattacctcacaccgtttagaagatattgagcgaatgtgcaaccggatcgggtttttggaaggaaatcagctgacgaatgtgatggacttggatgatatgaaggaagagtacatgaaaatccaaatggcatttgaagaggacgtcgccttgaagatcagagaacaaaacataccgattctcgaccatgccggtgtgttttatacggtgctgattcaaaagaacgatgagaagaaaaagaactttctgcaagagctgcggccgaaagtatggaatgaacttcctgtgaacttagaagaggtcttcatcgcgaagtttggagggaaccggagatggtagacaggggattgctgtacagggaatgggtgcagaatcgaactgttcttgtgatggtcggcatttttttagcggcggtcaatccatttgaagtgttaaatacctatctggtttatcaaggctgtctggacacccacggagcatattgtaagttttatgtgaattctttggatagcggaatgctgaacttgaactgggcgcccgctgtcatcttagcggtttgcttattcggactggaacgtacgaaaggaacgattgatgcgcttttcagtctgccttattcccgcgctcaggtgtttcacactaaattttggctcggggcggcggtcattaccggcgctcaggtgatcggctacgggctggctgagctgctcattcttctgttaaagcctgagcgcgtatatttcttccaccattacagcgtcggagagattattgtgagtattttggcttttgcattggtcgcgagtgcaggctgcttaacgggcaatacgttcgcccagctgttaacggcgtttactgtgtcgatagcgccttacctgattattacgctgccgctgtccaatgtagaagtcatcttcggagtcagcatgtatgagctgatgccgtcagtcgaggcttatctcaaagtaaacaatctttttcaatacttgattccgatcatgtacatagatacagattgggtatctgccagcaagtatatattaatcatcccggcagtgatgagcattgtattttatgccatcgggtacttttgctatgtcagacagccggcggaacggaacggccgtttttttctctggagacagcttgaccggcccattcagattgtggtgattataatcgccgttctcggttttggcctggcggggtactcgacgggacagacgatgacagggtatgtggccgggatgctggtcggaggagcgatcggatttttggtcagttattttgccatatataaaaaaacgaagcatgtgtaagagaggaggaccggaatgataccgcggggattgttgtacacagaatggaagaaaaatcagtggttgtttttatgcagcggcattcttttaatggcggcaaacccttttttggtttataacaactactcaacatatcaagaatgtatgaataaccaagctcttcaagattgtgaattcgttgtcaattatacgaatgggtcgcctctttccttcagctggattgtaagtgtcatcattgccgtcttcttattaggcttggaacggacaaagggaacgatggatgctttgttaagcatgccttacagcagaggccaaatctttcagacgaaattctggctcggcggggcagtcattgttgttcctcaggtgataggctatggagcggcgtcattgctgatatctttgctgaaaccgagccatacgtacgattttgatcatttttcaatcggaatgattgtcatcagttttatggcttacgccttgttaatggcatccggcgcattaacgggacagatattcgcccagctgttaacggcgtttaccgtcacggtactgccctttttactcatcggtctgccggccgcgaatttggaggttgttttcgattttagtgtgggagatcaattttcttttatcagcagttatatcgaatcccgtctttttatatttgtaacccctattggatatgtgtttaacgactggatcagagaaagggatttggttttaatcattccgattgtgatgagccttgtcttttatctgatcggttatgtcagctttctgaaacacccgaatgaacggaacggcagattctttctttggagaaaattggaccgtccggtgcaaatcttggtgattgcctttgctgttatgggtttcggcgttttcggatatggggtcacagacacgatgttcggctatttagccggcattatcttcggtgcggttatcgggtttttcatcagttattttacggtttacaggaagtcaaagcatatgtagatctgtttgaaaatgaacagtttggaggaaggcaaggtgccgattagcggtttgctttataaagaatggaagcagcggcagacgctgctgctccttacagcggggttcttagctattttaggccctttggcaattataaatgagtattttcactataaggattgtttgagtgcgcttcatcaatattcaggttcagtttgtacgttcagcattgattacagcaatcggaatttgattgggcttcatttcattcctccggttatgatggggctttttctgataagaggaggccgggctgaaaggatgtttacactgagtcttccgtattcaagaagccggatatttcatacgaagtttttcttgggagcagccgtgttagccggctcgcaatttgtttcttacggagtatctgacatattgtttctagcgcttaaacctgacgctgtccatcattttcaatcattcagcgcagggatgctggtcatcagcttgatgatttatgcattagtgacagctgccggcacgataacgggcaatttagcggcgcagctgatcacagcgttcacggtttccgtctttccgatcgtggttatgacgatttacctgttaaacgctgagttcctttttggcaggcaggctgtgccggatattgatttcccttggagcggatttctgatctatttcatgcctgccgcttacttccatacatcatggatgtattacatgaaacacgcattgttaatctccgcattaatgggattttgtttctatctattcggctatgtgaatttcctgaaaatgccgagtgaacgaagcggacattttatcctaagcaaacacattgaacgcaccattcaagtgctcgtcatggtgctcagtatgctgggaagtgcgggggtatgcggatatgcttataacggttcgtataccggttacatattcggcatgcttatcggcgcggttatcgggtttttcatcagttattacttcatctataaaaaaacgaaacagatataagggggagtggtgtacgtgatagaagtacagcatattgatcattcatttaaaatcggcaggaaaggcagagagagtgaggttccggtattgaaggatgtctctttgaccgttgaaaaaggggaaattgcctgtatcgtcggtcggagcggttccggaaaatcaacgcttctgaatttaatatccggatacatagcgccgacgaagggccgtatcgtcattaacggcactgatgtgacgggcttcagtgaaaaagagtgggcgcagttccgcctcgggcatttcggctttatttttcaaagttttcagctcattccgagtctgacaacctatgaaaatgttgaaatgccgcttgccttaaaaggcgtcaaaccgtctgaacgcaagcagaaagtcgcggacatgctgaaacgggtcggacttgagaatcatgcgaatcattatccgaatgagctgtcaggcggccagcagcagcgtgtcagtatcgcaagagccctgattttaaatccgtcaattattttagctgatgagccgacgggaagccttgattcagaaacggaacttgaggtgcttgcattaattcagcagctgaaccgggagcgcgggattacatttgtcatcattacgcatgacgatgaagtcgcttcgatcgcgcattcaaaattccagctgcatgacggtgtattaaaagggggcgttactgttgagatttaaggatcagattcactttatcagaagaaatatgaagaaaaaccggctgcgtgttttcatgacggtgctggcgacgacaatggcgtgcgcgtttttagtggtgctggcttccgtcggattcggcatccaaaaaacgattacagacattacgatgagccagcagattgttacggaaatcaatgtgctcggccaagagaacggaaaagccgtgaagaaatcagacttggaaaagtataaaaatgtcaagtctgtcgttgaaagaacacaagtgtatgaaccgaacaaagcgtcattgggaaaccgaacaaatgaagattcagccattgtgctgacaaacatgaacgatgaagtcaaagccaatatggagcttgatcagggaagagtcgcccgtacagagaatgaaatcgtggtcggctatgattttgcgaagaacctattgacgaaaaaagaggctgacgcttacgacaaagagttaaatgatcaccaaggcgacatgtcggaggtgaaaaaaccaaaaggctatacgaaagacctgcttaataaaacgatacagctgagcatctccaaaacaaacaaagacggagacgttgagaaaacgaaaacgtacgactttaaagtagtcggaattacaaaaaaaccgtcccaagattggatggaggatacaaatatttttgtgagtgatcaattcaagaaagacttctcaacattcttggatctgaagaatggaaatgcggaaaaaagcatcaatgtgtatgcggacaaattcgatcatgtcgatcagcttacccatgacctcacgaatgacggcttttatgtcagatctgtcactaccgagctgaagggcgtcaacacctttttccttgtctttaaaatcggcctgatctttgtcggctttatcgccgtcgtgatttctgccatcggtattttcaatacgatgacgatggcggtgacggaacgaacgcaggaaatcgggattatgaaagcaattggcgcaagcccgtccatcatccgcagaatgttcctgatggaaagcgcctatatcgggatattaggttctgtcatcgggattatcatttcttacggagtgagttttgccgtcaatctggctgtgccggttattttgaaagcggtagggggaaacaccggagccgaagatcttcattataccttctcctatatcccgctcagcctcgttgtgatcgcagttgtcatttgtgcgggggtcgcggtgatttccggtatgaatccggcccgcaaagcgacaaaaaccaacgttctgactgcattaagaagagaactgtaaaggaaaaaagccggctggacatcagccggtttttcctctatctatcagaaaagggcggataccatgtttcacattttgttaatagaagatgataacactttgtttcatgagatgaaagagagattaacgggctggtcatttgcggtgcacggaataaaagatttcagccgggtcatccgggagtttaccgaaatcaagcctgatttggtgatcattgatgtacagctgccgaaatttgacggctttcattggtgcagaatgatacgttcccaatcaaacgtgccgatactctttttgtcctcgcgcgatcatcccgcggatatggtcatgtcgatgcagctcggggcagatgattttattcagaagccttttcactttgatgtgttaatcgcgaaaatacaggcggtgttccgccgtgtgcatcaatacggcacagaaccggcgctgatgaaaagatggtgcggggcggtcattgacacagaaaccaacacggtcagccgtaaaaacggttcggtcgagctgaccaaaaacgaaatgctgatcttaaaactgctggctgagcagaaaaataaaatcgtcagccgggaagaactcatcagaagcctatggaatgatgagcgtttcgtcagtgataatacgctgacggtgaatgtcaaccggctgcggaaaaaactcgatcaattaggcatcgggaaaatgattgaaaccaaggtggggcagggatacatcgcaaaggaagaagacggtctttatgattaaatcatttctgctcgaaagaaagagctggatcgcgatgtttcttttgcagcaggctgtgcttctttttgcggcatatattgatccgtctattccgtttttttcggtgctgtatttcgtttacctgtctcttcttgtgtttcttgtatttctcttgttccgctatcgtaaagagaccgcctattataaaagcttaagagagtgggacgccaatttagacatgtcttatcttaaagcgcctgacagtccgtttgagtctatcgttgaagaaagcattgaagggcagacagagcagttaagaaaaagctcacttcaccttcaggcggcgtcagagcatgaaaaggacgatctgatgtcatggattcacgaggtcaaaacaccgctgacagcgatgcatctcatgatcgagcgccttgatgaacagccgctgaaagcccctttgctgtatgaatggctgcggattcaccatctcctggaccagcagcttcatcagaaacgattgtcctttattgaaaatgatttatcattccagcgaattcagctcagaccgctcgttttcaaagaaattaaaaatctgcaatcatggtgtatacaaaaagggatcgggtttgacattcagcttgattcaccagacgttcacagtgacggaaaatggctttccttcatcatcaggcagctgttaagcaatgccgtcaaatacagtgaggcggatgacattaccgtaaaaagctatgaacaaaacggccgggtgcatgtggatatcgaagaccgcggcatcggcatcgagcccaaagatcttccgcgcatttttgaaaagggatttacctcgacgcgaatgaggcgtgatcacgcgtcaacggggatgggcctgtatttggctcgaaaagccgcggctccgcttcttatccagatcagcgtgcgctctgagccggaaagcggcacggtttttaccttggtgtttccgaaacagaacgatgccgtcagcatgttcagcgtgtgacaaaagtgtcacatgcttttctcttttgttcgcttaatcaaacgaaaaaaacggcttctgtttttaaaataaagataaccaatgtaaaaggagaatcagaacgtgatgattttagaagcaggcaatatccaaaaaagctacggaaacaagctgaataaacaagaggtgctgaaaggaattgatcttcagattcacaaaggggaattcgtcagcattatgggcccgtcgggatcagggaaaacgacccttttgaatgtgctttcctccattgataaagtgagcgcgggcaccattaaactgaatgagacggagattacatccatgaaagaaaagcagcttgccgaattcagaaaacggcatctcggctttatttttcaggattataatttattggacaccctgaccgtgaaggaaaacatacttctgccgttatccattacgaaaatgtctaagaaagaggcggacctgcgatttgccgagacggcagaggagcttgggatctatgatttgagacataagtatccgagtgaaatttccggcgggcaaaaacagcggacgtctgccgcaagagctgttattcacgagccgggcattatttttgctgatgagccgaccggagcgctcgattcaaaggctgccacggatttactgaataaactcagccgtctgaatcaaaaacgccgcgccaccattgtgatggtgacgcatgatccggttgccgccagctattccggacgtgtggttttcattaaagacggccgtgtgtatacacagctgaataaaggcggtcaggacagaccggacttttttcaggatattatgaaaacgcaaagtgtattgggcggggttcaggcatgagtattcatcatttgatcttccagaacctgaaaaagaatatgaaaaactattacctttacgtttttgcgctggtgttcagcgccgccctttatttcgcgtttgtcacgatgcaatacgatccggcgcttgatgaaatgaaaagctccataaaaggagcggcggcaatccgggccgcctctgtactgcttgtggcgatcgtgtcggtatttcttttatacgccaacaccatttttattaaacggcgcggccgggaaatcggcttattccgattaatcggcatgacgaaaatgcacattttccgcatactcagcacagaaaatttcattttgtatttcggatcgatttggatcggtatttttgccggcttttctctctcgaaattatgtatgatgatgctgtttcatacagtcggtgtgaaagcctctgtctcactgtttttttcaagcaaggcgctcgttcagacgttaattgtgttcggggcgatttacgtgctgattatgatgatgaattacttatttattaaacggcaaagcattttgtctttatttaaaaccgcgtcatcgtcagaaagcggcataagacggctttcttgggtgcagatgtcgatcggtgttgtcggtattgcggccattatcgccggctatgccgtgtccgcggatttattcggaggcagttttacgagcatgaatgaactgttttcggccatggtgtttattctcggctcggtcattatcggaacctatctgttttataaaggttcggtcagctttctggcaaatctcatccggaaatcaaaaggcgggtatctgaatgtcagtgaagtgctgtctttgtcatccatcatgttccggatgaagtcaaacgccgtcctgctgacgattattacgactctttcggcgctggcaatcggtttgctgtctttaagctatatctcgtactattccgcggaaaaatcggctgagcaaaatacagccgcggactttgcgtttgataaccaaaaggagactgactcatttaccgctttattgaagaaaaatggaattgaacacaaagtgaaaacaatcaagaccattcaagccggtgtcaatatgaagaacatcataaacggcgacatgaaaagctttcaacaagacccgtccagcttggcgctgccgattataagcgagaaagacgcagaagggacggagctttctgacggagaagccgtgtttaccggatataatgatatgatgaaaagatttctcgacctgaaaacgtcaggttccattgatataaacggcaaaacggataaaataccgctggcgtataagggcttgaagaacgacttccttctgtcatatacatttacaagcggagggctgccgaccgttatcgtcacgcagcaggtatttgaccggatcgagaaagatatcgacccgtccattcagggaaaatcaaatcggtttttcggcattacactcaaacgtgaagaggacatccaaaaagctgatggtctgtttcaggcgcagcactattctgacggcgcgctttcacaatttgaaacggctgacacccaaaagaaaaacatggggctgatcatgtttattgtcggctttttggggttaacctttctgatcacctcaggctgtatcctttattttaaacaaatgggcgagtgtgaggatgagaaggctgattacacgatattgcggaagctcggcttcacaacgggggatctgctgaaaggcatccgccggaagcaggcgtatcatttcgggattccgctcgttctcgggctgttccacagctattttgccgttcagtcaggatggtttttattcggaacggaagtgtggacgccgatgatcatcgtcatggcgctgtatacgctgctgtactccatcttcggcatgctgtcggtgctatactataaaaaggtcattcaatccgcattgtaaaacaagttgaggagcctccgcataagcggaggctttttttgtatgaatagaagaaagcgatttttaaaagaatagacatacgtcattttctcgcgcgggggagccttatgcagaagtattttcaattgaaatctgaaacaggagcctttcatcttttttccaaggaacacattttcacgcttttggtcatcggattgcttggggtgtgcgtgatcatattccggaaacagctcaatcacggccggccgaatcgcgttttccgctatgtactgttcattctccttgccgtgtcgcagatcagctatcatatatggctgctttgtcatcatgcctggtcgctgaaaacagctctgccgctgcagctgagcgacctttccgtctatttggcaatgctgatggtcatgacaaaaagcaaaaaactgttcgccttcctctattttgccggtttgggcagcgccgtacaggcgatggcaacacctgatttaggggcgtattctttccctcattttcggtacatcgtgtttttcgtctcccacggctgtgtttttcttacctgcctattcatggccgcttcagaaaggtacagaccgtcggcgcgcggactgtgggtgtctgtgctgatcgtaaatctgtacggggcgtgtgtcttttttattgatcgtgtgctgaatgcgaattacttatatttaatgaaaaaaccgaagaccgcttcgcttctgaacgttttcggaccttggccgtggtatcttctatcaatggaagcggcggtgatattgagctttttcattctgtatattccgttttggctgctgcggaaaagagcatgaggccggcctgtttttgtgaatccaatcatttgtaattttttcaacattccggcattatttttttcagattctgatgttgaaaaaagacgtccgcggcgatagaatgaatgtgctatgataacgtgttcgatacggagccgcggcttgcggtttccgttttttcatggggttttttatagagagagggggatcggtatgccgcgcgctttgaagatattaatcatcggaatgtttatcaatgtgacgggcgcatcttttttgtggccgctgaatacgatctatattcataatcatttagggaaatcgctgactgttgcgggggttgttctgatgctgaattccggggccagtgtggcggggaatttatgcggcggatttttgtttgataaaatcggcggattcaaatccattatgctgggcattatgatcacattggcaagtcttctcggactcgttctgtttcatcaatggcccgtttatatttggctgctcatcattgtcggcttcggttccggtatcgtgtttccggccagttacgccatggcgggagcggtatggaaagaaggcgggcggagagcttttaatgcgatttatgtagctcagaacgcaggtgtcgccgtgggctcggcactcggcgggatggttgcggcgtactcgtttacgtacgtgtttttagccaatgctatgctgtatgtgctgtttttccttatcgtatttttcgggtttcgaaatatcaaaacccaaaatgcgagccaggtttctgttctggactacgagcctgtcagcagcagaacgaaatttacggcgcttctcatattgagcggcgggtatgttctcgggtggatcgcctattcgcagtggtccacaaccgttgcgtcacatactcaaagcatcggtatgccgctttcattatacagtgtgctctggaccgtaaacggaatattaattgtcgccggacagcctctcatgggagctgttctgaaaaaatggtccggtgcgttaaaaacgcagatggtcatcggcttttgtatttttatcgtctcgttcggcgtgcttctcagcgccaagcaatttccgatgtacctcaccgcaatggtgattttaaccgtcggagaaatgcttgtctggcctgccgtgcctaccattgccaatcagcttgcgcctaaggggaaagaaggattttaccaaggattcgtcaacagtgcggcgacgggcggcagaatgatcgggccgctccttggcggcgtgctggttgatcagtacggaatgagcgtgctgctgttgatcctgatggtgcttcttgttgtcagcatcgcagcgacggtgctgtacgacaaacgcctgaaaaccgttaataaacaaaacgtccaagtgcgatgacgacataaaaaaatcccgctgtttcggcgggatttttttgtttatacgaccggaagcacgttgaccgcgtccttaacgtttaaatacgtctttaatgaagaaaagctggcatcaagctgattcattctcatggcgagggtaggcttgatcccggtgataatcaattccgtgccgattaatttaagcaggtggtgcaatttgaaaatccggtctgcggtctgttcgtttacctcggccagacctgataagtctataattaagtaatcatctttagatgcggttaatatgtccgtcaaagttgtcacaattgaatcaaatcgttcttccgttaagtttcccactaacggcaaggcggagatgccgtttcggatcggaacaatcggtgtagacagcgtcgtgatttctgtgagggaatcctcaaggagcttttcgtattctttctgctctgtaatgtctttttgaaaaccgacaaaatagagcttgtcttcaacataaagaggatcaatgttgagttcattccaaaacggggtgccgtcttttttgacatttttcagccgcaccgtgatcttttctttctgggttaagctctttctgattttcgcgacttgttgacggtcggtttctttgctttgcagaaatctgcagttcttacctaatatctcttcggaagagtagcctgtcatatccataaatccctgatttgtatatatgatgggattgtcctcaagagaggggtctgtaatcaccacgccgatgcgtgcgtgatcaagcgcctttttgataagctccagctgctccagttttccgaatacatttgagtcagccatgtaaaacccccttttggccgtaaagctgcgcgctttttcagccattgtttctcccctttttaaatgaatctacagtaaccgtagcataacatatgttctgattcaagcagccgaagtttgcaatttgtcattcgggcttgtcctcatatacactgaatatataaggggaaggcacatcatcgctaagtaagtgactaggtcattgtcactgggtgaaaaatgaatctaatgcatcaagcttaccgatcatgtgttcacatataatggaagaaacaagctttttactttcctgctcaatcgccggtatgtagatatcgaaaatcatcgtattcgtaagggggctggatggcctgaagtcgctttactaaataagggctttaggaaggtgatgaagatgctgcatcaggtaataattgcttgtgtaattggaggaatcatgggggttctcggtcatgtgaaaaagagaggcaggctggagaaacccagaatgacaaagcggtttatctatctcggttttttggaagatggttttatcggaatggctgcttccatcttacttgtcttatccgctgaccccgattcaggaattcaactcgtcatcttatccataatcgcaggctacggcggagaagctgttctcaggagctttgattttgtcagagaacaaaacagtaattcggccgaagcaaaaccacaccagcaaaaaaatcctccatcaaaataatatccccgctcatgacccgttccgggtacattcccattgtatacaaacctgcttgcacttatgaacagaattctataaaatacaggtaagattacggtagcgataagaacagtgaagaggagcagtaagaagcagattttgcaatcagagagttgacggccggtgcaagtcaatcaagtctgtttccgaactcgcctcagagttgcagcggcaaaaccgctgacgcataactgcgttaaaagtatcaagtgagtgcggctcaaaaccgtgctaacgagggtggtaccgcgggaaataaaaatctctcgtccctttttgggatgagggagtttttttagttttagaataatctgaatataatctttctcatcccgtcaatacttggactacatacgccgtattcaatcagaaggaggtttttacgttgagttttcagcacgaaaaaatagaaaagaaatggcagaattactggttggatcataaaacgttcgccgtcagtgaagagaatgacaagccgaagttttacgcgcttgacatgttcccgtatccttcaggagccggccttcatgtcggacatccggaaggctatacggcaaccgatatcctttcgcgcatgagacgcatgcaaggatacaatgtgcttcatccgatgggatgggacgcgttcgggcttcctgccgagcaatacgcgcttgacacggggaatgatccggctgagttcacaaaacaaaatatagataatttccgccgccagattcaatcgctcggattttcatatgattgggatcgtgaaatcaatacgactgatccggactattacaagtggacgcagtggatcttcaccaagctgtacgaaaaagggctcgcttacgtagacgaagtgccggtcaactggtgcccggcgctcggaacggtgcttgcgaacgaagaggtcattgacggcaaaagcgagcggggcggccatccggttgaacgccgtccgatgagacaatggatgctgaaaatcaccgcttatgcggacaggcttcttgaagatttagaagaccttgactggccagaaagcattaaagacatgcagcgcaactggatcggacgctcagaaggcgcaaacgtgcatttcgcgatcgacggcactgatgacacgtttaccgtgtttacgacaagaccggacacgctgttcggcgcggcttatgccgtactggctcctgagcatgagcttgtggaggccatcacgacgcctgaacaaaaagaagcggtagacgcttatgttaaagaagttcaggcgaaaagtgacctggaacggacggatcttgcgaaaacaaaaacgggcgtcttcacgggcgcatatgccgtaaaccctgcaaatggggaaaagctgccgatctggatagcggattatgtcctcgcctcttacggaacaggcgctgtaatggccgtgccggcgcatgatgaacgtgattttgaattcgcaaaagtgttcagcctgcctgtcaaagaagtcgtaaaaggcggaaatacggaagaagaagcgtacacgggggacggagagcatgtcaattccggctttctgaacggactgaataaagcggaagcgattgaacaaatgatcgcctggcttgaagaaacgaaaaacggtgagaaaaaagtgacataccgtctgcgtgattggctgttcagccgccagcgctattggggcgagccgattccggtcattcattgggaagatggcacgtcaacagccgttccggcggaagagctgccgctgattctgccgaaaaccgatgagatcaaaccgagcggaacaggtgaatcaccgcttgccaacattaaagagtgggtggaagtcactgatcctgtaacgggcaaaaaaggcagaagagaaacgaacacgatgccgcaatgggcgggaagctgctggtatttcctccgctttatcgacccgaaaaatccggatcagctcgcttcacctgagaaactggataaatggctgcccgttgatatttacattggaggagcggagcatgccgtgcttcaccttctgtacgcgcgtttctggcataaattcctctacgatatcggtgtcgtgccgacgaaagaaccgttccaaaagctgtataaccaaggaatgattctcggggaaaataatgaaaaaatgagtaaatcccgcggaaacgtcgtcaatccggatgaaattgtggcgtctcacggagcagatacgctccgcctgtacgaaatgtttatggggccgcttgatgcatctatcgcctggtctgaatcaggtcttgacggagcgcgccgcttccttgaccgcgtatggcgtttgtttatcgaggaaaacgacgagctgacgggcaaagtgacagaaggcgcgggcgaaactcttgagcgcgtctatcatgaaacggtcatgaaagtgacagaaaacttcgaagcccttcgttttaatacgggcatttctcagctgatggtcttcattaatgaagcttacaaagcgaatgaactgccgagagaatatatcgaaggttttgtgaagctgctttctcctattgcgccgcatttggcggaagaactgtgggaaaaactcggccacgaaggttcgattgcatacgaggcttggcctgcttatgacgaatcaaaactggtggacgatgaagtggaaatcgtcgtccagctgaacggaaaagtaaaagcgaaattaatggttccggctgatgctgataaagcagcgttggaacagctcgcacaagctgacgaaaaagtaaaagagcagcttgaaggaaaaacgatccgaaaaatcattgccgtaccgggcaagcttgtcaatatcgtggcaaactgaccgggcgaagcccctctcctacagagaggggcttttttatcagcctctatcatagaaattgcacagcgggctttggtatacttaacaccataaagatgaatgggagtgtcacacattgaaaataaatgaaatcagcacagccgtactggaagaaaaattaaaagcgggagaagagctgtatctgattgatgtcagagaagacgaagaagttgccgaaggaatgattccggaggccgttcacatccgcatgggggacatccctgagaagatggatgcgttagacaaggacaaggaatatgtatttatctgccgttccggaaaaagaagcatgaacgtttgtatgtatttacatgagcagggcttccgtacggttaatgttgaaggcggcatgctggagtgggaaggcgaaacaaagccgaagaaataacgctttgaagtgaaagaagaaaagggacgtgcgtctttttcttctttttttataaaaaaacgggaggcgaatcaggtgaaaccgatgatccgcgcgatgaaaacaaacgatatcaaacaggtccggcaagtcgcagaacgaagctggcatcatacgtatgaagggattattcccagacacattcaagatcagtttctcgaatccgcctatcaggatgagatgatggaacgccggctcttgcattctctgttctttgtggcagaagaagaggggcgagtgctcggttttgcaaatgccaccccggttcaaaaagacggaaatgcggagctgaccgccatctatattgacccggattgccagggaagcgggataggcacggcactccttaaagaaagcatcaggcagtccggcggggtaaaaaagctttatgtccatgcagaaaaagagaaccgcattgccttatccttttatcaagcgaaagggtttcaatgggtatgtgaatttgaagaagattttaaaggacacactttacagacggtcaaactggtactgaacatataaaagcgtccggcccgcccaaatggtcagtgataagccggaagccggtctttgtgcgcttcaaataagtcatcgcacaaagatatgatgtcattcatggaaagctcggcgcttgtatgcgggtcaagcatggccgcctgatatacggcttccttttttaatgtaacggccgcttcgatggttaaaagctgtgtgttaatgtttgttctgttgagcgccgcgagctgctccggaagttcgcccgaatagcacggcataatgtggtttttgacggctgtgcaaggcacttcaacgaccgctttcgccggcagattcggtatcagcccggtattcagcacattgccgccgaatgtgaacggtttgcccgtctccatcgcttcaataattctcgaaccgtattcttttgagcgttcgtgcgtcaggttttggttgttgatgatgccgtctctcatcgtttcccaattgttgatttgttccgcgcatctcctcggatattcatcaagcggaatttggagttcatctatcagctcaggataccggctttttataaaatacgggtgatattcggcattatgctcagatgattccgttacgtagcagccgaatttatccatcagctcaaaccgcaccatgtccttatgtttcgtcttttgtttttcgcgtgcccgtcttttaatttcaggatataaatcaattccgtcttttttaatctccaaaagccaagccatatggttaatgccggcaatgcgttcttccgtcccttcgtgatccatgccgagtgagtcaaacagatctttggtacatacctggacgctgtggcacaggccgaccgttttgacattcgtatgtctgagcatcgctccggtcagagaggccatcggatttgtatagtttaacagccacgcatccgggcagacctcttccatgtcttttgcgatgtcaaataaaacggggatggtgcgaagggaacggaaaatgccgcctattccgacggtatcggcaatcgtctggcggagaccgtaccgcttcgggatgtcaaagtcaatgaccgtcgcgggtttatagcctccgacctgaatggcgtttatcacatagccggcgtgtttcagcgcctgttttcggtcatcgtaggagatgatggatatactcgtattgtagcggtctctcatgttttccagcatgagctgggattctttcagccgtacagcgtcaatatcataaagcgcgaattcaaacccgtttaatgcttcagtcagtaagcagtcccccagtacattttttgcgaaaatcgtgctccccgctccgataaacgtaattttcttcaacagaaattcctcccttttcttctcagcctttgaccgccccggaggacagccctgagataaaatatttttgaagcgccaaaaacaatacgaccatcggcagcatcgccataattgcggctgcggcgactaagtgaagattgttcgcgttttcgccgaaaaatcccgccatggccacagtcaatgtctgcaccttttgatcttgtaaaaagaaaatcgcaaattggtaatcgttccagataaacacacaggaaataatgcagaccgttgcggtaatcggtttcaacaaaggaaacacgattgtataaaaagtcctgatcaatcccgcgccgtccatcctggcggcttcctcaagctctttcggaatggaagagcggataaaccccgaatataagaaaacggtcagcggcatatatgcagccgtattaatgagaatggctgcggcatgcgtattgatcagccccgcatcagcgaccatcttgtataaaggaaccatggaagtcaaaggcgggatgatcatgattgaaatcaaaaggccgaagacgattttgttcagctttgtatttcttcttgcgagcgggtatgcggcaagcgaacccatgaaaattaataaagcggcggaaacggctgtaatgataatcgtgttcagaaaggattgcccgagagaggcacgttcccatgcttcacgaaaattctgaaatgaaaaggcggatggcagcgaccattttgaactgtagtcaccttttgcttttaatgacgtggtcagcaaaatataaaaggggacaatatgaacgcacgagataacggctgccaacagcgtaaaaatccgcattcgggctgttttcatgacatttccgtctcctttcgcttgaaatacacgagagccgaaaagctgatgacaagaataatgacggacataaacacgccttgggcggcggcatatcccgcatcctgccgtttaaaatataaatcatacataaacgttgacatcgattgagaggaattgcccggcccgcctgcggtcagcgcgaaaatgacatcaaacagcttcagcccgccgatgatattgatgaccatgttgatggtgacagccggcatcaataaaggcagggtgatggtgaaaaacggctgaagacctcccgcgccatccatttttgcggcttcgtaataatctttcggaatgctttgcagccccgccaaatatacaatcatcgcaatgcctgcgtattgatatgtgttaatcatgacgataatccacgggtttgccgcagggcttgccaaggcgttgacaggaccgattcccagtgcgccaagcacatcattcagcgcacccccgtcatatgagaaaataaaataccaaatgtatcccataatcagcggactgataatgacgggcaggtagacgatcgttcttgtgagcgccttcatttttaagctctgattcaaaagcagcgcatataaaagtccgagcatattctgaaaaaaagtgcttccgatgccgtaaagcaaagtgtttttcacaacaagccacgtgtccggatctgtaaaaagccttttatattgagtaacccccacccattgatacgtctgtgagaagccgttccagtttgtaaatgtgataaaagcgcctttgacaaacggaaaaatcatgaaaataaaaaccgtggcaagagcgggaacgtacatccaccacagtgacgcgggttttaccggcttttgatgttgaaatccttgggtttcttttgcaagatcactcattctttttcagctccccatgaatcagattgaagccgaagccgcttatattccctgccgagtttcgctgaaatttcagcgggggttaagatatcggccatcagctcctgcccggctgttcccatcacatcccacattccgttcggcaaataaaggcggtcaaaataaggctgcaccttaatatgctgatagcgcttatagtcatttgcgtagaaaatgtccgtttgcacattcactaatccggccggaagcgaggtcgcttcggcaattgattttgcatgctcgggtcgggccataaatgcgataaactgtttcgcttcttcaagccgcggggaatccttgaatgccgccagcgtgtaacgttcgcctccgatccaaaccggcgcgtctcccttatggacggccggggtcggtatgatgccgacttttaccttcggattgatttgagcgacgtcttggccgagggtgccgccctgcagcgtaaaggcgattttgttttgcgccatcagttcaatgagctgggaccgttttgccgtcacggcatctatattgagcaggttttccttttgcatctctttcagtttgtcagataaataggtgaagtgtgtccagcggaaggttccgtttaacagttgttttttgtaacggtgtgcgggatctgtgatgagaagcggtgcggcgaattgatcgtaatattgggcaaatgagcttttctcatagccggcaaaccagaagggggtgactgttccgccgcttttttctttaatctgtcgcagtgccttcataaaatcatccattgtttccggcggtttgattccgtatttttctaacaacgtacgattgtaggccagtccgtcctttgcctgattcagagggaaggcgtatattctgcctttggcgtctttgagcatgctgtttaaattcggatcgagccgcttcgtccaagacatgccgctgaggtcggcggtatattctccgtagcggattttggcccagccgtgtgtgtcgaaaagatcgggcatatcaccggccgccatcctgaccctcatcatattttcgtagtcattgcctgggaaatgaacgtttacttgaatgtccggatgttctttttggaatgaatcagccaactttctgaatacggcgcgttcgctgtctgaggatatggtggaatagactgtcaatgttttctgcttttctccggcgccgctctgttctgccgagcagccgggaagtatcatgcaagtaaaagaaagaaacaaagccagtaagcgtttcatcttttcctcctttaaatatgatataaacgctgcgggacacgtcaccacctttcttgtgagccgcagctttgtctgacaatcaatgaagtggggagcgtcacggccagcgggacggttctgccgtttaaacggtcgagaagcaatttgacacccgtccggcccatctcttccgtgtatacttttaccgttgataacggcgtgctggcgtattctgcctcatcaattccgttgaagctgacaaccgccgtatcgcgcgggacttgaaggccggcttcctgcaaggcttttaaagcgccgacagccatcgaatcacttgcgataaaaaaggcatcggggagacttccgcctttgacggcttcattcatcagccggaacccttcgtgcatgctgtattcgccgatcagtacatgctccggctcggcgccggccatttgtaagaaagcggtcagacgcttatcctcaatcgttttattgctgtttacaccgtctatgacggtatgttcccgctcccggccgccgatataaccgagccgctggtaaccgagcgacagtagatgttctatcgccttttgcgctgcggcataaaaatccacgctgacggaatcgtagcgggcgggatcgggggtgccgttaacaaataccgcgtgcctgaaagcggcgctgatattcgtaagcgcctcgtcttgcaggctgccgatgacgatgacgccgtccagttcgtgaaacatatgctcttgaaaagaaccgagatggatagaagatgtgataaaaattttttgccgaaagcattcttcttcaatgccttttcggatcgccgaaaaataaggatcctgccgttcttcttccggtgacaggcagctgacaacgccgatcaggggcgctgaatcgctgcggctgcggttcttccgtttttttgccgacggctgatagcccagctcatcggcgatcctcagaactttttctcttgtttcatcagtcacagccaaagagtcatccttattcaaaattctcgatactgtcgcgctggatacagatgcctgtaaggcaatatctttgagacggaccatttcgcatctcctttttactaaatatttactaaacagaaatgacctggttattgttaaaatgatattatcatacgagagtaagcgttttcaataactatttttggttacttttagtaaaaatcagtaaaaaagaaaatctgtttttctctatcatatttcaattgaaccggaataaattgatagagaaaggagagggtgatgtgctgaagatagctgtttttgatgaggagcatgaaaaggatctgcagactgaagtcaatacatttttaaaggggatttctgatgaacagctcgttgatattaaatatacggtagcggcggcctgtgatcctgaaggtgagcagctttattgtttttccgctctcattttataccgaaaataaaaaagcccggacgaaatgccgggcttcgttgttcattatgcttttttgacgcggggacttcttggtttttggtatttctccgcttgtttgattccttttctctcgctcgctaatgacttgtacagagacacgatcatcagaaggatcacgactgaaaacggaaccgcggcgagaatggccgtgttttgcagtgcggccagaccgccggaatataacaaaaccgctgccacggcggactggatgacgccccagatgattttcacccggtttgacgggtctaaagagccgtaagacgtttgcattccaagcacaaatgtcgctgaatccgctgatgtaataaagaatacagcgatcagaacaagcgttaatacggatgtcaccattgtcagcggatagtggctgagtgcgccgaacagcatcgtatccgttgacattcccgcgacattgaatacgcctttctgctgaagatccatcgcggatacaccgaagatcgcaaaccataagaaagccaatatacaaggtgtcaccaacaccccgattaaaaattcccggatcgtccggccccttgatacacgggcgataaaaatgccgacaaacggcgaccaggatatccaccaggcccaatagaaaatggtccagctgttaatccattcgcgtttttggggatcattcggagacaagcgaaagctcatctgcacgatattttggatgtattggccgatagaatcggtaaatgagttcataatcagcaccgtcggacctgcaatgagcataaagatcattaaaatagccgcgagcgccatgttggtattgcttaagtatttaatccctttgccgattccgctccacgcagaaatcaaaaataacacggtcacgacagcgatcaggatcagctgaacggaaaatgttttcggaatgccgaataaataatgcaaaccgccgttgatctgagtcgctccgagccctaagcttgtcgccacaccgacaacggtcgcaaacacggcgatacagtcaatcgctttgccgatcgggccgtttactttatcgcccaaaagcggtgtcagtgtgctgctgatcaaaccgggcgcgtcttttctgaattgaaaatatgcgatacataaagcgacaaccgcatagatggcccaagcgtgcagcccccagtggaaaaatgtgtaccggagcgcatcccgaaatgcttggggcgtttctgtttcacctgagggagagctgatggcgtaatggctgatcggttccgcagccccgtaaaataccaaaccgattcccatgcctgcgctgaaaagcatggcaaaccatgataataagccgaattccggtttttccccgggttttccgagttttattgtgccgatcggacttacaatgagaaagagacagaaaccgacaaatatagaaacgaccagcagataataccagccgaaagaatccgtaataaatttttgtgccgtatcagtgacttgctgcaggctgtcaggagaaatggccccccataaaaccgcagcggctgtgatgacaatcacaatccaaaaaacactggagatgttcttcttcaaacgttctcaccctctgactatttttttcaatacgccattttgttttagtatggtcgtacgattgcagatcaatcctttcttcctattccctcaatcaggtgaaacaaaacgcagaaaactctatcatgtttttggtcaattatcaatggggacgctcaggtaaatgcgctttaaaccatttagagcgagcgtgagaaacgtcctgcattcaaaccggcgagacgccctgtgacaaaggctgaagtgatattgtagcccccggtatagccgtgaatgtcgagtatttctccgcaaaaatataagccttccattttttttgacgccatttgtttcggctcaatctcttttacggaaacacctccgcctgtgacaaacgctttgtccaaagaaagcgttccgtcagcggcaaccgtaaattgtttgcagtctttgacaaaagccctgaattgatccttcggcagttccgtaaagcttgtctgcggatcaagaccgttccgttccagaagaaaaagcaggtaccgttcctgcatccacggcttcagcgcatttttgagcgcttttttcggtgcgtctttcagttccttgtgcatcttttgaaataactcttcctcgttgatgccgggaaacagatcgatgcggagtttgacctctggctgctttttcagttctttgacgacaaactggctgcagcggagaatggcggggcctgacaagccgaaatgggtgaacagcatgtccatcacgtgtgtgacgattggtttgccttttttattcaggacgctgacggccgcgtttctaagagacagcccctgaagtgttttttgtttaataaacggttctgacgacgtaaccggcacttccgtcggaaagagttcggtcacggtatgaccggccgcttccgcccatgcatagccgtctccggtgctgccggtatgcgggactgattttccgccgaccgcgataataacggcgtctgcgttaatgtgttcgtcattgtttgtcgtaatgcctgctgtcctgccgttctcgtaccgcacttctttgattttttcatttgtgcggatggtgacattcagttgttttaatcggtttaaaagcgcatcgacaacgctttgcgctttgtccgtcaccgggaacatgcgcccgtggtcttcttctttcagctgaatgccgagtttttcaaaaaaggcgatgatatcttcattattaaattcggaaaacgcgctgtataaaaagcggccgttgccggggatgtgtttgatgatttcttcaacggggaggcggttggtcacgttgcagcgcccgccgccggaaatcgccagcttccgtcccagcttgtttcctttatcgattaataatacgtccgccccttcttcgcctgccgcaatcgcagccattaaaccggacgggccgccgccgatcacaatcacgtcataatgtttcatctttcatcaacaactttctttttcacgtataataggcggaaatgtccgctttctgctattatagcgaaagaaagggaatccttaaacgtattttgttttttaaagagttttcccaaaaagtttcccgctgtaattattaccgtctaattgcccagttgtgttaaaatagaaaagttgaatcttcgtagaaaatggtgatgaggaaacatgtcaagcaaattgttaaggggcacgttcgtgctgacgctcggcacctatatatcgcggattttagggatgatttatctgatcccgttcggagcgatggtcggagcgacgggcggagctttgtttcaatacggatataatcaatatacactgtttttaaacattgccacgatgggatttcccgccgcggtttcaaaatttgtctcgaaatataattccaagggagactatgagacaagcaggcggatgctgagagcgggaatgtcggttatgctcgtaaccgggatgatcgctttttcaattctttatatttcggcgccgttttttgcggaaacatctctcggcggcacgagtaacaacggacttacgattgaccacgtcgtttatgtcatccggatggtcagtctggcacttttggtcgtgccgattatgagtcttgtgcgcggttttttccaaggtcatcagatgatggggccgacagccgtttcacaggttgtggagcagcttgcccggatcatctttttattgggcgcaacgtatttgattttaagagtgatcaacggcggccttgtcatcgcagtcggatacgcgactttcgcggcgctgatcggatcattcggagggcttgtcgtcctttatatttactggaataagcggaagggcgatcttctggcgatgaagccgaatctcgtccggtctgcgaacttaagttataaaaaaatgttcattgagcttttcagttatgccgctccttacgtatttgtcggactggcgattcctttgtattcgtatatcgatacgaatacgtttaataaagcgatgattgcggcgggccataaggatatcagccaggacatgcttgcgattgtcaccctttatgtgccgaagcttgtgatgatcccggtttctctggcgaccgctttcggtctgacgctgattccgacgattactgaatcgtttacgagcaggaattataagcttttgaaccagcagattaaccagacgatgcaaatcattctgtttttggttattcccgccgttgtcgggatgtccgtgttatcgggtccggcctatacgtttttctacggctctgaaagtcttcgcccggatatcggacaggatatattgttctggtacgcgcctgtcgcgatactgttttctctgtttaccgtaaacgccgcgatcctgcaagggattaataagcagaaatttgctgtcgtgagtcttttcatcggcgttattataaaagtggtgctgaacgtgccgctgatcaagctgtttcagggagacggggccatcttggcaacggcgctcggttatatcgcttctcttctgtacggttttattatgattaagcgccatgcgggctattcgtatacggtacttataaaacgggtcattttaatcgcggtcctgtccgtcgtgatgggagtcgcggtcaagctgactcaatggctgctcagcttctttgtaacataccaaagcggccaggtgcatgcggcgattgtcgtctttgtctgcgccgctgtcggcggtgcggtgtacatgtttgccgcgtaccgaatcggatttttacagaaaatgtttggaaaccgtctgccccgcgttttgaggagaggcaggcattccgcccattgagaaataatgaatagtccgcttatcgcgggcttttctttttaaaggagaggatcaggatgagacttgataagctgcttgccaacagcggattcggctcaagaaaagatgtgaaaaaaatcgtcaaggctggggctgtcatgattgacggagagccggcgaaagatgtgaaaacccatgtcgatccggaaaaacaggacatcacggtatacggagagccggcagactatcgtgaatttatttatgtcatgatgaataagccgcaaggagtgctgtccgctaccgaagacagccgccagcaaacggtggttgatttgctgacgcctgaagaacagcgatttgaaccgtttccggcgggacgtcttgataaggatacggaaggctttttgcttctgaccaatgacgggcagctcgctcatcgcctgctttctccgaaaaagcatgtgcctaaaacatatgaggtccggttaacctcgcctctgtcaccggaagacatcgttcatctggaaagaggcgtcgtcattgaaggaggctataagacgaagccggcagccgttgaaatcattacagaaagcccggatgaaacggtgattcacttgaccattacagaaggcaaatatcatcaggtgaagctgatggcaaaggctgtcggaaatgaagtggcttatttgaagcggctttcgatgggggctgtttctcttgacccggatcttaaaccgggagaattccgcgagctgactgaagaagagctcgaaacgctgagaggcgctgaagtgtaatcgatatcagaaaagcccaaaacagatttgttttgggctttttatatagaggaacaaaaaacaaggcaaagacgctgctttgccttgcagcatgtcaggccgaaaagggccttatgtaattgttcgcttaagatgtaattttcactttttttcgtgttgtctcccacttgcctcggctaggactatgaacaagatcattgtatgctaacacatttaagtctcgctgaatggttctaggtgtaatgccgaattcatcaaccagttcctgtgttgtcacaaggcctttttcctggatgaacatgtaaactgatttaatccgagtcagcatacgatttgttgaaggtttcaaaaaaccactccctatcataagatcggatggacttgatataccacaactttcgactctaaaacttcgtacgaataagcaacaaaggatgacattctgttttttctcttttaactgcctccattatacacgatatggacaacatgaatctaggaataagcgcagataattttttccaaatgggtgccgccttggtgcattactatgcccggtccgcttttattattatggaaactgaaactttttttatacatgtccgtatgaaaacgggggagtgagaagtttgggagaattattgaatgcaaacattgtctgcgccggttatgctgacaggccgaaggtgatttctgatgtatctctgtcagtcaacgctggtgaaattaccggtttaatcggagcgaacggcgcggggaaaagcacagtgataaaggcggttctcgggctgtcccgggatatagagggcggaattgagtggaatgattcatcttatgcttacataccggagcgtccgagtttttatgatgaactgacgctttgggagcatctcgagctgaccgggtcattgcggggcatggaaggggaagagtgccgtgagcgggcagggcggctgcttgaagagttttcgctgacgtctgtaaaacatgatttgccttccggtttttcaaaagggatgcagcaaaaattgatgctcatacaggcatttttggcgaagccggatatttacatcattgatgagccttttatcggacttgatccgatctcaacgaagctgtttaccgacatgctgattgctgagaaagaaaggggcgcggggattttgatgtgcactcatgttctggatacggcggaaaaaatctgcgaccggttttatttgctggatcagggcgctctgcttcttcaaggcacgttagaggagcttcaggaaaaaacggggagccgttcactgctggattgcttttattcagcggttcggagcagtcagcgatgaccgggcgggctttgttttttcaaaggctgtttcattattggcggtatcaatggaaggtgtttcagacggtcattgattggacggtcgcgctgtatatcgttcttcccgctgccgcatttgccgtttatcaatatgctgattggctgaacggcagggggcttcttaatggagcggcaggagtattaggatggggctggctgtatgtattcagtgccctgctattgtgcacgggttttattcatacctttttgctggaagcggatcacgtatttttggtgcatgcaaaacatctgatgcaaaagctgaaacggtacgcgcttttgtattcgatgttcctttcccttatcaaatggggtgcgcttgccgtattgttatttcccttatggcgccaatacggtgactgtaccttaccggcatattcgggtatgttttgctgtctgttcggcttccatactgcaatattagcggtgcaccgacacagaaaaaacagcaggcggacattcgggaatcaggcggcaggctggctgaaagtgatggttctgatggcgggtgcgttttttatgatcgtctttgccgccgaatggtattggctttggccggcgggatgtatattgttcatctgttccgctcttttgacttggaaagggacggagacattatcggcctttgaggaagaagtgcttgaggagaacaggcgcaagctttcattcgcggcctctgttttgatgctcagccatgatgtgcagctcccgaatggtaaacataaagggcggagcaagccgtttttatatcccggctcaaagcacatctttacaaaacggtcggcgtatacggcgtggaaagaattgttctttaaagtgctgatccgaaacggcgggtatctccggcagctttaccttttaaccgcggcttttacggctcttattctcgttcttccgctcttagtgaagccggcagtcctcattttgtttgcaatcgtcagccgctatgccgcgtcacttttatttgaccggatcacggataaaccggttttaagcggtatcaagagagacagtgatgactatttcagggcgcgaaacagcgcattaaccgtcatccaagtcatctgttccgcctggtgtctcattgccgcgattctttccgttctttatatgtgaaaatccctttccgaaaaaggaaagggatttttcttaatgtccgttcaaaataaaaagctgaataaaaaacagcacggcgaagatgatgactaaaggatggatttcgcgccattttttcttagctgctttaacaagcggatatgaaatgaagccgagtgcgattccggttgaaatactggacgttaaaggcatcgccaaaatgacgagaaaggccgggaacgcttcatcaagctcattccagcggatattcgataccgcacccatcatcaggctgccgacaataatcagagccggtgacgtaatcgcggacacttccgataagacgctgacaagcgggctgaaaaacatggaaacggcaaacataaccgcaatcgtcagcgccgtcagacccgttcttccgccggccgccacacctgctgaagattcaacgaacgcggtcgtcgggctggtgccgaagatgcttcccaccgtcgtagcggtcgaatcagccaaaagcgctcttctggcattcggcagctgattgtttttgatcagtcccgcttgttcggcgacaccgatcatggtgccggtcgtgtcaaaaatcgtaacgagaagaaaagaaaacacaacggcgtacagaccgtgatgcacgacatccccgagggctccgaacggatttgtgatcaaaagcccctccggcaggtgcgggaaggacatgaatcctttcgtgaaatgaatctgaccggtcaaaaaggcaatgatagcggtcagcgccattccgatgaacagagccccgttaacattcagcaccatcagtacaatactgatgataagcccgataagcgttaaaatgacggcgggcgaatgaagatcgccgagtgcgaccagattagatttatcagccgtgatgattccggattggcgtaagccgataaaagcgataaataagccgatgccggtcgtaattccgtattttaaattgtccggaatcgcttctataagttgttttcttaaaggcgttaacgataaaataataaagatgactcccgcgataaaaacggcgctgaaagccgtctgatacgtaatgccgctgcctgtgccgacaacgtgaaaggcgagatacgcgtttaagcccatgccgggggcaatggcgatcggaaaattcgcagcgagagccatccataaagttccgacaatggaagcgataatcgtcgcggtgaacacctggtcaaacggaattcccgcattggaaaggatcaccggattgacgacaatgatatacaccattgtgaaaaaggtggtcaatcccgcggtaatttctctttttattgtcgtttgatgcttgtcgagatgaaacataagtacctccaatgacgaacattttttcaaaacatcatctatattattcgttttatcgacattttgcaagtctttatcaagaaaggggatttgtgatgaactgggaagttgaagtcatcagaaacaaagaagatctgatccgtgacacgcagaagtttttgcagatcaacagcgtaatggacgaatcaacagccggtcccggccggccgtttggagaaggcgtcaatgccagcctgacgtcactgctggaattcggtgaaaaagaaggcttcaccgtaaagaatcttgatggctatgcgggccatattgaatggggaacgggtgacgaaatcgtcggcgttttgtgccacgtcgatgtcgttccgcccggagacggctggacgagcgatccgttttcagccgatatcagggacggccggatatatgccagaggcgccatagatgataaagggccgacaatggcggcgttttatgcgctgaaaatcgtcaaagacatgcagctccctttatccaaacgcgtgagaatcatcatcggaacggatgaagaaagtgattggagatgcgtggatcactacttcaaacacgaaaaaatgcctgacatcggctttgctcctgacgcggattttccgatcattaacgcggaaaaaggaattatagatgcatcactgcgcattgtaaaaagcgcttctgacaaagacgcaaaaaatgggcttctgtcattccgttcaggactgcgcttgaacatggtgccggatgcggctgaagcggttattgaaggggacggtcttgatgccgtgcacgcatatttcagcaaatggcttgagcagtcaaaaacacaaggtgaagcaatttcggaaaatggaaaactgacgcttcgggtatacggaaaatcatgccacgcgatggaaccggataatggtgtcaatgccggcttaaagcttgctgaatgccttaacggaacagagctggatgaagccggaaagcactttgtcaaaaccgtcagtgactattttttaaatgatacacgaggcaaaaaactgaaaattgattgcagggatgacatcagcggagagcttacattgaatgtcggcacctttacatacagaaagggtgaggaaggagaactcggcatcaacatccgttatcccgtcacttcagacagcaaagtcatccgtgatgcttttacgtctgctgaagaattccggcttgaagaatttaaagacagcaaaccgcaccacgtttctgccgatcatccgctcgtaaagacgcttcaaaaggtttacgaaggacagacgggaaagaaagcggatctgatttcaatcggcggaggaacgtatgcgagatccctttcggcgggcgtcgcgttcgggccgctgttccccggccggcctgacagcgcgcatcaaaaggatgagtacattgaaatcgatgaccttctccggtcaaccgctttatacgccgaagccatttatgagcttgccaagtgataataaaaagggacgccgaaagcggcatccctttttatcattcaaatgaccataaatccgttgataaataacgttctcccgtatcggccgtcatacagatgacgatctgttcggaagggaggcgttttgcggtttcaatggcggcgaagcaggcggcgcctgaagacgggccgacgagtataccttcttcccgggccagacgacgtgttgtcgtatacgcatcttcatcagatattttcatgatttcatcgtaaacgtcctgattcagtatgccgggaataaatccggggcttgtcccgacaagcttatgagcgccgggttttccgccagacaggacgggagatcccgcgggctcggcgacatgaacaatcatatccgggaaaagctccttcagcgtttctccggttccggtaatggttccgcccgttcccgccgttgccacaaaagcaccgagcggtctgttgagctgctgaacggcctgatagatttcaatggcggtcgtttttcggtgggcatctggatttgcgccgttatcgaattgcatcgggataaaacttcccggaatctgttcggcgagttctttcgcttttttgatgcttccgggcattctttccgcccccggtgttaacacaacctccgctccgtacgctttcaggaggttgatgcgttctttcgtcatcgtgtcaggcatgacgaggattgccttgtagccgcgcgccgccgcgttcatcgccaggccgatgcctgtgttgccgcttgtcggttcgatgatgacagagccgggttttaaatgcccgctgttttccgcctcaatgatcatattgtaagccgctctgtctttgacactgccgctagggttaaacgattctaattttaaatagacctgtgctgcatgttctggctgaaggcggttgagctttacgatcggtgtgccgccgatcagctccgccgtgctgtttacgattttcaaggccggctcattcctttctgtataaaacgttcggtacataatatcctatcataatgagcggacagggttctcctctccgcttatccgttttataataacaccataaccaaagagggggagatcctcgtatgaaagcttcattgccgcattattttatcggcattccgattccggctgacattgctgaaccgatttgggaagcagccaaaaaggagccggcgttaacattcaaaaaatgggtgcacccgcatgactatcatattacactcatttttctcggagccgcggatgaagaacggcttgcgaaattatcgtctctgctcgcagatgctgcgtcggcagcgcagccgtttaccgtacagtttcagcatctggatattttcggcgaccgcagacagccgagagtgcttcaccttgagcccgaacggaatgaactgctctttgatttgcgggaaaaaacaaaacaggctgttttgaaagccggttttcaagtggaaaaacggccttatcaccctcatatgacgatggcgcggaagtgggcgggagaccggccgtttcctgacgatgtgccgtttgaaagcggcagggtgcaaagtgccgtcagccggttttccctgtttcagacccatcttgaccggtcgcctaaatacgaagaaatcgcacagtttcaattgacataaacaaatattcggagtggagaaatcacatggcacagatcatcaaaattcacgactgcatatccagatatgaacttgatccatatcattatatgaaccagtttatccggctgaagaaagaacgctttgaggcgcttcttgaagcgtttgaccggatgacggaagaaaaagaaacggaaacggctgcaggcggggaaaccgatcaagcgtcggccaggaaaaaattttccttaaaaaagagaaaagaagaaaatacggccgatataaatgaaaagaggcaccaatggtttgatgagccggagggagaagaggcgctgttcgggaatctcccgtctcgaaagtctgagctcgcgccttttttcaaagatcagctgtatgactttcaattaaaatgggcgagctccacgctttctcaaaagtctgagctttcgcaggcggtcaaaagggacaggatgttaaaaatgctggctcaaaagctgcccgattcctattttgtgatgtatcatccggttctgcaaattcagcaggcgtccgttgaactgagcatgatcatcatctcgccgctggagattttctgcgctgcttttatggaagcggaagaggacagcgtatatatcggatcaaaacaccgtttttgggaagaaagaggctccggcagcacgcgtcaagtattgaatccgtctctcagcctgcaccggacaggctcggtcgtttcgcaaatcgtaaaagaaaagcaggccgacattcccgtgcggaagcttttgctcagcagaacgtcttatattgattacccggagccgccgtacgggctggaaatagctgataaacggactgccgcagagtggctggaaaagcagcagaaaaatacggcgccgatcaagcaccaccagctgaaggcggcgaaggctcttttgtcttacggcttgagcgattcaagccggagacaggaatggcttgattaaaacggatgtttgccggctgtctcttcatctatgaagcaggtgaaaacaaacgatgagtcaatggttttttattattaatccggtctcaggaggcgggcggagccggcgtgtctggaaatcagttcaaaaagagctgaccaggcgcggggtcagccaccgctcttttttgaccgggcatcccggacatgcggaggtgctggcgaggcagatttcaatgatgcaggatcataagcttaagcggctgttcgtcatcggcggtgacgggacgatgcatgaagtcattaacggactgaaaggaacggatcagattgagctgacctttgtgcccgccggttcgtacaatgacttttccaaagggctcggtattaagaagtcggcgctcctccaagaaatcaaaagtctgcaccgcccgctcacacggaaattttttgcgggaaacatcaacttttttcatgacaaagcgcaatcactttattttattaaccacctgtctgtcggcttcgatgcctcagttttgaaggcagcggcgaattttccgttatcgcgcgttcttcggtttttgcgtctcggttttgtgatttacccgctcgcgcatttacatacggcctcggggtttcagccgttcagatttgtttgcacggcagacggccagaggcgagaattccgcaatgtctggtttgtcatagcggctaatcacccttattacggaggcggcatgaaagcggcgccttcagcaaatccccgtcaaaaccattttgatattgtcatcgcagaaaacctgtcctttttctcgctgtatcgttttttatgggcgatgagcttcggccggcatatcaaaatggacggagtgacgatgataaaggggaaggaattcgtttttgaaacagatgggaaaattccgtttcacgctgacggcgagctgatcggaacgacgccgtttcggcttatgccgggcggtgcgctgttgaaaataaaaacataataaacaaatgaaacccgtcaaatgtttcacggcaaagagcggttcgcggcataaatcttcagaattcacaggtgttcttgctagttttgcttgacgaagtttgtgctgtagcgctaaaatttataggacggctattgattagcatatgagactctcaatagctgtcttttttattctcatgaaattgtttatgacaggccgctccgccaatagagaaaggctggaggcctattctaaaatattttaagaaatgatgggttgaacattgatatgaactggttgggacaattactaggtagcgattgggagatcttccccgccggaggagctacaggagatgcatattatgcgaaacataacggccaacagctttttttaaaacgtaatagctcgccctttttagccgtgttatccgccgaaggcattgttccgaagctggtttggacaaaacggatggaaaacggagacgtcattacggctcagcattggatggcgggcagggagctgaaggcaaaggatatgagcggacgcccggtggctgagctgctccgcaaaatccacacatcaaaagctttgctcgacatgctgaaaagattgggaaaagaaccgcttgatccgggcgcccttttgtcgcagctgaagcaggccgtctttgccgtgcggcaattttcgccgcttattcaggaaggccttgcttatttggaagctcatgtggatcaggtgcaattcggtgaaaaagtcgtttgccattgtgatgtgaatcataataactggcttctgtctgaagacaaccagctgtatttaatagattgggacggcgccatgatagctgatccggccatggatctcggccctttattgtatcattacgtcgaagagccagcgtgggacagctggcttgggatgtacggcatgaagctcacggaagggcttcggctgaggatggcgtggtacatgttatcggagaccatcaccttcatcgcctggcacaaatcaaaaggaaacgacaaagcgtatcatgatgccatggaagagcttcatgccctgatgaagcggattgtcaagtagtcaggagtacgaatccatctgctccacccattgggacaaatggttttggtgctcctgaatatgcgtgtcgatggaatcggccgtgatgccggactggctgtagcggtagacatcctcgagcacgttttttatatttgaatcaagcccggtgttggccatcagtgatttgatgacgcgctccagctgttcatactcggcaaccgtgccgcagcaatccaattgatggtcggccaatatgtcctttaataaccggacctgatgttcgcttgttaagcccatgattcatatacacatcctttctgtgtcatacattgtgcaaagcggtgcggttttatgcatcacatgagtgttccggaccggggagcctctttttttatgcagccggcgcctttaaaaggcgcttgcggctctttatgtttcatggtatgttgttactcgaaattatagatagaggtgtcaatcatatgagaatgcgccataaaccttgggcgaatgattttctggcagaaaacgctgacatcgccatcagtgatccggcccagtataaagggcgatggaacacggtctttggcaatgacaacccgatccacattgaagtcggtacgggaaaagggcagttcatttcaggaatggccaagcagaatccggatatcaactatatcggcattgagctgtttaaaagcgtcatcgtcactgccgtccaaaaagtcaaggacagcggggctcacaatgtccgtttgttaaatatagacgcggaaacactgaatgacgtatttgaacggggagaaatcaagcgcgtatatctaaacttttctgacccgtggccgaaaaaccgccacgaaaagcgccgtttaacatttaaaacgttcttgaaaaaatacgaagaagtgatgggcgaaacaggtgagattcattttaaaaccgataaccgcggtttattcgaatactctctgaaaagcttttccgaatacggcctgcttctgacggaagtcagccttgatctgcacaacagcgatccgaagggcaatattatgacagaatacgaagaaaaattctccgcgctcggccagccgatttaccgggccgaagttgaatggagaacaaaaggcagactctgatgcgggagtctgtttttttatgccgccatttgctaccattacatcaggagggatcaagatggagacattgaatattgggaatatttcattaacatggctggacggcggtgtgacgcatatggacggcggagcgatgttcggcgttgttccgaaacctttatggtcgagaaaataccccgtaaatgacaaaaaccagattgaattaagaacagacccgattctgatcagaaaaaacggcctgaatatattggttgacgcgggaatcggccgagggaaattctctgataaacaaaaaaggaattacggcgtaacacaggaatccaatctgaaacaatctcttcgtgacctcgggctttcttgtgaggacattcatattgccgcgatgacccatcttcattttgaccatgcatgcggcctgacggagtacagcggagaggagcttgtctctgttttcccgaatgcccgcattatcacttctgcaacagagtggcgcgaaatgagaaaccctaatatcagatcgaaaaatacatattggagagaaaattgggaggcggtacaagatcaggtcgaaacctttgaaaacgagtatcagctgacagaaggcattacgatgcaccacaccggcggccacagcgacggccacagcgtcatcgtcttagaagacggtggggaggcggctgtgcattttgccgacctgatgccgacgaatgcgcataaaaatccgttatgggtgctggcctatgatgattatccgatgacctctattccagaaaagcagaaatggcagacgttcgcggcagaaaaagacgcctggctgattttctatcacgacgcgatttacagagcggtaaaatggggagaagacggcgaagtggctgcatctgtcaaacgggagagaaaataagcggatcgatgatttgcctgtatgaatttcgggaataaaagcaaacctaagacaaattgctttgaaaggaagagacaggtgaatcaatttcaagtgaccaaagatggagaaatcaaaacaactctgcgcggattagaagtgctttctacgccttttttaaataaaggggtggcctttacacaggaggaaagaaaggaactcgggctcgaggggtttctgccgccgaaagtattgacaatcgaagagcaggcgaggcgtgcctacgaacaattcagttcgcagcctgatgagctgagcaaaaatgtgtacttgaccgctctccatgatcggaatgaaacgttattttacaggctgttaaatgatcatttaggcgaaatgctgccgatcgtatatacgccgaccgtcggcactgcgatccagcgttacagccatgagtacagaaaaccccgcggtctgtatttgtcaatagatgaccctgaaggaatgcgcgccgcatttcagcagttcggaaaaaatgaaaacattgacttaatcgttgcgacagatgccgagggcattctgggaatcggtgactggggcgtcggcggcatcgccatttctgtcggaaaacttgcggtgtatacggcggcggcaggaattgatccgtcacgagtgcttgcggtcgtattggacgcggggacaaatcaggaaagcctcttaaatgacccgctgtatgtcggaaaccagcattcaagagtgcgcggcgagaaatatgaccgctttattgatgagtatgtctcgcttgcccgggaaacattcccgaatgcgctgcttcattgggaggatttcggtacggctaacgcccgcggcatattaaaacggtataaagataaagtctgtacgtttaacgatgacattcaaggaacgggcgcggtatcgcttgcagctgttttagcgtgtgcaaaagcatcaaaagtgcctttaaaagagcataaagtcgtcgtcttcggcgcgggaacggccggtatcggaattgctgagcagctgcgcgaagccatggtgcatgacggattaagcgaagaagaatcctacagccatttttggtgtatcgacagaaacggattgttaacggatgatatgaaggacttgcgtgattttcaggttccgtacgcgcgccctgctgatgaagtaaaagagtacggccgcagcggtgaaggcggatcaattgatctggcggagacggtgcgtcaggccaagccgacgattctgatcggcacatccaccgtatcaggcgcatttacggaagaaatcgtcaaagaaatggcctcgcatgtcaaacggcccgctattttgccgatgtcaaacccgacgacattatcagaagcaaaacctgaagatttgattaaatggacggaaggccgcgcgcttgtcactacgggtagtccgtttccgcctgttgcgtataacggcgttacctaccatatcggacaggcgaacaacgcgctcgtattcccgggactcggactcggcacgattgtgacaaaagcaaggctcattacggacaatatgttcgttgcctgcgcgaatgccatcgccggtatggtggacgtcggcaagccgggggcgccgatgcttccaaaagtggaggatctcaggacggtatcggcaactgtggcggtagctgtagcaaaagctgcgattcaggacggtgtagcggaaacggaacccgaggatctgatccaagcggtgcaggacgcgatgtggcaccccgtatataaacgaattcggccgatgtaaccgaataaagcccaaaacgctgatggttttgggctttattttttgcttgtccgaattatgaggcgacagaatcaatgacatcgacaatctggcctgtttttgcattgaccataacttcatattgctccagttcgccgaatgccgaacgtgtcacgccggtcttgtatacctggatggtttctccgtttacctggtagggctccggctctgtgtaaatccatgatccgtctatcggcccgcgctgtttaaaagccgctttcacgatacggagcgctttttctgaagagatataaggtttcatcgcatactttttcactgcgatggcagcgcataatccgactcctgcacctaagagaaaatgacgtaatttcaatatgaagcacctccaattatgtcgtagtttttattatacagaagatgccagacggtgttaagtaaagcgtcggttttccagcccattcaatctgagcgcttggaaaacggttgtttttctaataaaataaaagcattacatagaaatgaggggaaaatatgaatgaggaaacgaaaacgcttttccggacgctgacgcagcttcccggtgcaccgggaaatgaacatcaggtccgctcctttatgaaacgggagcttgcgaaatatgcggatgacatcgtgcaggacagactcggaagtgttttcggagtaaggcgcggcgctgaagatgcgccgaccgttatggtagccggccatatggacgaagtcgggtttatggtaacgcagattacggataacggcatgctgagatttcagacgctcggcggctggtggagtcaggtgctgcttgcccagcgcgtcgaggtgcagacggataacggaccgattatcggcgtcatctcaagcatcccgccccacattttaacggatgcccagcgcgcaaagccgatggagatcaaaaatatgatgattgatatcggtgccgatgacagagaggacgcggtcaaaatggggatcagaccgggacagcaggtcgtgcctgtctgcccgttcaccccgatggccaacgagaagaaaatattgtccaaagcgtgggataaccgctacggctgcgggttaagcattgaactattaaaagagctgcacggaaaagacctgccgaacaatctgtacgccggggccaccgttcaggaggaagtcggcttgagaggggcgcagacagcggccaacatgattcagcctgatctctttttcgcgcttgatgccagcccggcaaatgatatgagcggcgataaggagctgttcggccgtctcggcgagggggtgctgctccgcattctcgacagaacgacggtcatgcaccgcgggatgagagagttcgtccttgatatggcggaaacgcacaatatcccttatcaatatttcgcttcaggcgggggaacggatgccggacgggtccacatatcaaacagcggggttccgtctgccgtcatcggcatttgttcaagatacattcatacaaatgccgccatcatccatgtcgatgattatgccgcggcgaaagaaatgctcattaagctggtcatggcgagtgacaaacagacggtcgaaacgatcagagaaaatgtgtaaaaaaataagcaggaccgcataaaggcggcctgcttattctgtttcaaataaataagagagtgctttcatcgcttgattgacggtttcgaccgtgatattcgcttttccggaaagctctttcagcggatgatgaagttctttcggacggatgagaatgagcggctttccttttgcgatggcataagaagcatccatcgcggtattccactgcttatatttctcgccaaacagggcgatcacaaaatcggctttttccatcagcacctctgtacggaaattgttgatatcagaagctctggcgtcttttaaaacagaatcgggctgcacgcccataatctcttctccgatattgtctgagcgttcatggttttccatcgggccgacaaacgtaatcggcaggtccagcgctgttgctttttgtttgatctcgtcccgccaatcactgtggatttcacccgctaaatacacgacaaactgcatcttttgcccctccttatgtacatattcatattttcgtacggctacaagcaaaatggtaaacgaaacttgcttgataatgcaaatgaaatatgataatgatattgcatatagttggtcttgccgtaaacagtctggtatgatccaattggacaaacatcagcatataaaaaactcataatccagatggaggaatgacaatgaaaaagattgaaagcacggaagaattgcaaaaagcggtacaagacgattgggcggtatttatgttttcagcggattggtgcccggactgccgctttgtggagccgtttctccctgagctggaagcggactttcctgaattcacttattactacgtagaccgcgatcaatttattgatacatgcgcagaatgggaaatttacggcattccgagctttgttgtgtttaacggaggaaaagaagtgaaccgcttcgtcagcaaagaccgtaaaacaaaagaagaaattgagcaatttttaaccgattcccttgctaaagcataaaggaggccacgggctttgaaaatgacgtcaaggaagctggcggatttattaaaacagcgcctgcagcacgagaaccgatccttcttttttgacagagaaaaagacaccctccgtgttgaggatcaaacgaccaaaaaaggcatcacattggagctcccgccgatcattgcgaagtgggagacgaaaaaagaagaagcgatcgacgaaatcgtctactatgtgtcagaagcgatggaggcgatggaaggaagcggacaggagatgtccggaaaggaagccggaatctatccggtcatccgctccacatcatttcccgatcaaacgagtgacggcattccgctcgtgtatgatgaccatacggccgaaacgagaatctactacgcgcttgacctcggcaagacgtaccgcttaattgacagccgtatgctcgagaaagaaaactggacaaaagaacggatcagggagacggcgtcattcaatctccgctctcttccttcggtcgtgaaacaggatacggttgcggataattatttttattttttcagggcgaatgacggctatgacgccagccggattctcaatgattcgattcttcatgaatacaagcaggccgctgaaggcgaattagcgatttccgttccgcatcaggatgtattaatacttgctgacattcgaaatgaatcgggttatgatattttagggcaaatgtccatgagcttctttgcaagcggcaaggtgccgattacggccctttcatttctgtataatgaaggcagactggaacctgtgtttatcatggcgaaaagccggccgaaaaaggattagaaaggatttttcttatgaacgctttttacaataaagaaggtgtgggagatacgcttctgatctctcttaaagatgcagcacgcgaagaaatcggctatgaaagagaaggcgatgtcgtcagaatctttaacaaagaaacaaaagaaacgacgggctttaacatttttaacgtgtcttcttacttacagattgaggacaacggccccgtcgctttgtctgagacattcgtacaggatgtgaatgaaatactgaacagaaacggcgtttcagaaacgctgacggttgacctttctccgaaatttgttgtcggtcacgttgaatcgaaagaaaaacatccgaatgcggataaactgaatatctgccaagtgaatgtcggagaggaaaccctccaaatcgtttgcggcgcgccgaacgtggacaaagggcaaaaagtcgtcgtcgctaaagtcggcgcggtgatgccgagcggacttgtgattaaagacgctgaattaagaggcgttccgtcaagcggcatgatctgctccgcgaaagaactcgctttgccggatgcgccggcggaaaaagggattcttgttcttgaagacagccgcgaggccggcgaagcatttcaattctaactcccataaataagcgcacagaatcgaatgatgtgagagaaagccgttaagcaggcctgcttaacggctttcttcagttgggagcttaatcttttctgagccgcccggcaatggtatactaaatatcgtcccagactactaaaaagggagttagagagtgattaaacatgagttggctgaataaattttttgacttatttttaggtgaaaaagaagaagagcatgaacatgaaccaaacacgcatgcccaaatcccgaaacagcagataccggatcagccagaaggcaaattcacgcgcatggaagatcctaaaatatattacgaatatccgaaagggaatttccgcttccccgtcgttccggacggctataagcgaacggagcaaaaccaaagacagcgggaaaggcacgaacgccgccagccgtcccgggattatgccgccgggaaggagcaaaccgagcggaaacagcatacacataaagagcctgaaacggtgaaaaagccctttaaaccgtcatccattccttcaccggtttacggctttcaatctcagcacagcataaaaaaagcgcctatatccgaaaagcggcgtgaagagaacgtaacattgctgtcagaggagcaatttgttccgctaaaagccggtcaggaaacagaaaaagagcccgtcttcacaacatacggcataacaaaacagacgaatgaccggccagaaccgtttgcgaaacaagaaacggaagaaatcccggccgttaaaaaagaggagcttcacaccgaggctgagaatgcaaaagagcaagtgtttgcagcagcagaaccgcagcagactgaagagcgggagcacacggaaagcgcggagtctgccggctttacagaagaacaagagcatgaacaaacccgcccgcagcctattaaagagcctgagtatgaagcatcccgaacggctgacaacacagaggaacaagctgcgccgcaggaggaatatcaggagcctgagccggaaaaagcaccgccttttgaaaccgcggaagaaccggtgtatacatacacagaacccggatacgaagaggaagttcagccgcaggctgaagacaagcccgaatcagctgaaaccgacgcgaaacaggaagcagactctcagcctgagtacaatgaagtcacgcggcattcagaccccgagcctgaacctgcaagcatcgagacggccgatgccccgtcccggcctgccgaagaaaaaacggagcatcacggacagcctcagcctgtgaaaaaagcggagcggccgaaagagcgcaatgttccgtttaacgtcatgatgcttaaaagcgataaacacaagcaggcgaagacgccagagggcggagcgagctatgtctttccgaatctgtcgcttctggacgtaccgccggcgcaaagacatgacgaccaatcgtggattgaagaacagcgcgagcttttaaacgttacactgaaaaactttaatgtgcgcgcccaagtcgttcatgtcacacaaggcccgtccgtcacacgttttgaagtgcatcctgagcccggagtgaaagtaaacaaaattacaaacttagcagatgatattaaactgagcctgtctgccaaggatattcggattgaggcgccgatccccggtaaaaacacgatcggcattgaagttccgaaccgcgtaagcaaagtcgtcgatttaaggcagatgatcagaagcgccgctttcaggacgaatccgtctccgcttacagccgcgctcggtgtcgatatttccggaaacccggtcgtcattgatttgaaaaagatgccgcacgggttgatagcgggtgcgacaggatcgggaaaaagcgtctgcatcaataccattttggtcagtctgctttataaggcggatccgagtgatgtcaaaatgcttctgattgatccgaaaatggtcgagcttgcgccttataaccaaattccgcatttggtcagccccgtcatcacggacgccaaagccgcgaccgccgcgttaaaatgggttgtggaagagatggaacggcgatatgaactgtttgcccattcgggtgtgagagatatcggccgctttaatgaattaaccgccgatcataagacaggcgaaaagcttccgtacctcgtagtggtcattgatgagcttgctgatttaatgatggtcgcgccgaacgatgtggaagaaagcattgccagaatcgcgcagaaagcgagagcctgcggcattcatctgcttgtcgcgacacagcgtccgtctgtcgatgtcattaccggaatgatcaaggcaaacataccgacgaggattgcattctccgtctcaagccaggtagattccagaacgatcatcgacatggcgggagcggaaaagctgctcggaaaaggcgacatgctgtactgggaaaacggtaccggaaaaccggtgcgcctgcagggcaactttgtatccgacagagaaattgaccgcgtcgtctctcatgtcagaaagcagctgccgccttcttatttgtttgaacaggaagaactgatcaggcagggaaccgccctcaaggaagaagacgaactgtttcctgaggcgtgccaattcgtcgtggagcaaaacagcgccagcacctcaagccttcaaagaaggttcagaatcggttataatcgcgccgcgaggctgattgacatgatggaagccgaaggcatgatctcagaagcgaagggcagcaaaccccgtgaagtgctgattacggccgctgacattgctcaagaataagaatatcgttcatttttctcacaaacatggtatgatagtggatggaccatcaaaactgcatcactgtcacgcgctgaaatatcatgcggcaggtttaatcaaaaagaaagttacagatactgacgataacgtaaaaataaatggaagcgccgctgtgcgggcttttcgcccgcggcggtcgcaaaatgaaatgagcgtcatatactggggaacagatagacgtttgttggaggtacgattatgactgtttatcattttgttggaataaaagggacaggtatgagcccgcttgctcaaatcctgcatgatacagggtatcaggtgcagggatcggatatcgagaagcagattttcactcaggctgcccttgaaaaaagaaatatcccgatctatccgttcagcgccgataacatcaaacccggcttaacggtaatcgccggaaacgcattccctgattctcatccggaaatcgcaaaggcgctcgctgaagggattcctgtcatcagatatcataaatttttagctgaatatatgaaaaaatacacaagtgtcgcggtaacgggcgcacacggcaagacgtccacaacgggcctcttggcacacgtgatgcagcaggcgaagccgacttcgtttcttatcggggacggaacgggcagaggaaatgaaagcagcgaatactttgtatttgaagcctgcgagtaccgccgtcatttcttaagctatcagcctgattatgcgattatgacgaatattgattttgaccaccctgattatttcgccaacattgacgatgtgtttgatgctttccaaaacatggcgcttcaagtcaacaaaggcatcattgcctgcggtgatgacgagtacctgccgaaaattcacgccaatgtgcctgtcgtttattacggcacgggagaagaaaatgattttcaagcgagaaacatcgtgaaaaatacggaaggcacgacatttgacgtctttgtccgcaatacgttttacgatacgttctacatcccggcatacgggcatcacaatgtcctcaattccttagcggttattgcgctctgccactatgaagagatagacgtgaacatgattaagcgcggacttgaatcattcggcggcgtcaaacgcagattcaatgaaaaagtgatcggcagccaggtactgatcgacgactacgcccaccatccgactgaaatcaaagtcacgattgaggcggcgcgccaaaaatatcccgaacgtgaaattatcgcggtatttcagccgcatacgtttacacggacgcaatcattccttgatgaattcgcagaaagtttaagcgcggccgatcgcgtgtatctgtgtgacattttcggctcagcccgcgagaacgtcggcaagctcacgatcacggatcttcaggaaaaaatcgataacgcagaactcattgaagaaaatgacacatccgtgttaaaagcgcatgaaggcgcagtgctgatcttcatgggcgccggagacattcaaaaatatatgagagcctatgaaaacgtcatagcgtaacgaaaaagcagtggggctctcactgcttttttgcgcgtgctgcaaagggatttaccgagaaacggagaaatagtatacatacagatctttcatatatgtttatcattttaagaattgggtatataccactatatcctgcattaaggaggtattagatgatcatcattctttacttaagtgtcgcactcattgccgttgcatttctcatcctcgtcatctatctgtccaaaacattaaagtccgtgcagatgactttaacaaacgttgcctcgactttagacggccttgaagggcagatgaaaggtattaccgcagagacaaccgagctgttacataagacaaaccgtctcgcggaagacattcaggaaaaatcagagaaattaaatacggttgtccatgctgtccaggaagtgggaacttccgtccagcagtttaatacatccataaagcaggcagcaggttccgttacggcctctgtaagagagaatcaggataagatcagtcaggttgtcacctggagccaggccgctatggaaatatgggacaagtggaagcaaaagaaaaaaacatcgctttaatcataagaaaaatccactaaggaggaatcataatgagcaaagatggaatcaatagtaaggattttttaatcggaacgctgatcgggggaattatcggcgcgacaacggcgttgtttctggcgcctaaatcaggtaaggagctgcgcgacgatctcggcagtcaggcttctgcgttaaaggataagacggacagaatgacggccgacgcgaaagaaaaaggctctcaatatgtcagcatcgccaaggacaaaacatctaatatcacccagctggtagctgatcagtcaggccagattatgaataaagtgaaggatttaaaagaccgttctaagagcacactaaccgagaaagccgaagagacgagaagcgaaatgcaggacacggcccaaagcatcaaggccgaagcggaagacgccggggaaaaagccggtcaggcaaatcgctgatcttcaataaggagagataaccgacatgacaaaacagctgatatcgtctgaagaagagttcaaaaatgccgctgagaaagaaaacacgctcgtgtttttgaaacacagcacaacctgcccgatcagccaagccgcgtttcaggagtttgacgcctttgcatcggcgcattcggaagtgccttcttattacctgcaggtgcaggacagccggccgctttcaaactatatcgccgagacatacggcgtgaaacatgaaagcccgcaagtattcgtcattgcaaacggcgaagtgaaatggcacgcgtctcattcacaaatcacaaaaaacgcaatagagcagcacctttcataattgctggccgccggttgataccggcggtttttttttttgaaaaaaactattgatcatttcagccggatcatgtaggatatcaatatatactgcttcaacgcataaaagcttaaaagcgttttggtgataaagccgaatgtgaaaaaatttattatttcatattcctattttcgcataactgtagtaagatgcatgttaaccattaaaataaaacatagcatagaagggatgaaaaagatgagcaacaaggaattagagagcctaagacagcaggcagacgcactaaacttagaaatccttaaattaatcaatgaacgcggagccgttgtaaaagaaatcggtaaagcaaaggaagcacagggtgtcaaccgatttgaccctgtcagagagcgtacaatgcttaaccgcataattgaaagcaatgacggcccatttgaaaactcaacgatccagcatattttcaaagaaattttcaaagccggacttgaacttcaagaagaggatcacagcaaagcgttgctcgtctcccggaagaaaaaagcagaagatacgatcgttgatattaaaggtgaaaaaatcggtgacggcgatcagagattcatcgtcggaccttgtgccgtcgaaagctatgagcaggttgccgaagtcgcggccgcagcgaaaaaacaaggcattaaaatcctgcgcgggggcgcgtttaaaccccgcacaagtccgtatgatttccaaggtctcggcgtagaaggcctgcaaattctcaaacgcgtcgctgatgaatatgacctcgcagtgatcagtgaaatcgtaacgcccgcccacattgagcaagcgattgattacattgacgtcattcagatcggcgcgcggaacatgcaaaactttgaattgctgaaagccgccggttccgttaaaaagccggtattgttaaaacgcggtcttgctgcaacaatttcagagttcatcaatgcagctgaatacatcatgtcacaaggaaacgaccagatcatactttgtgagcgcggaatcagaacgtacgaaacggcaacgagaaacacactcgacatttctgccgtgccgattttgaaacaggaaactcacttgccggtgtttgttgacgtcacacactcaacaggccgccgcgatctcctgcttccgacagcaaaagcggcgcttgcgatcggcgctgacggcgtgatggccgaagttcaccctgatccttccgttgccctttcagactctgcgcagcagatggatatacctgaattcgagaaatggctgaacgaattaaagccaatgctgaaagtaaaagcataatacaacgttccgctctttaaaggccgccacgcgcggcttttttttcgtatcttcattttatttaattataaaatgaaagtgaacgttttcatcactgggaaaaacgtgtataatttcatgagagatatttaaatttgatgaataatgaaaaataatgtacactactgacttacgcttacaatcataaacgacagaatgcgaaatcgtacgacatttctttacataaagtgtttatgctatagataaggataagtgtatccagtaaaaggagtggtttcagtgagcaacattacgatatacgatgtggccagagaagcaaatgtcagtatggcgactgtttcccgcgtcgtgaacggcaacccgaatgtaaaaccgacgaccagaaaaaaagtattggaagccattgatcggctcggctatcgcccgaatgcggtggcaagagggcttgcaagcaaaaaaacgactacggtcggcgtcatcatccctgatatctcaagcattttctactctgaacttgcgcgtggaattgaagatatcgcgacgatgtacaaatataatattattttaagcaactcggaccaaaatcttgagaaagaactgcatctgttaaatacgatgcttggcaaacaagtggacggtatcgtatttatgggcggcaacattacggacgagcatgtcgaagaatttaagcgctctcctgtgccgatcgtcttggcggcatcagtggaagaacagggcgagacgccttctgtcgccattgattatgaacaggcgatttatgatgccgttaagcttttcattgataaagggcatcgcgatattgcactcgtctccggaccgatgcaagagccgatcaaccgttcgaaaaaactgcaagggtacaaacgggcgcttgaagaagcggcgattccgtttaacgagcaattcgtagcggaaggcgattacacctatgattccggtatggaggcgcttcaaagcttgatgggccttgaccggaaaccgacggcgattctttctgcgacggatgaaatggccctcggcattatccatgcggcccaagatcaaggtctttcgattcctgatgatcttgatattatcggttttgacaatacgagattgagcctgatggtccgccctcagctttcaacagtcgtgcagcctacgtacgatatcggcgccgtggcgatgagacttttgacaaaactgatgaacaaagagccggttgaagagcatatcgtcgaattgcctcaccgcatcgaattaagacaatcaaccaagtcataaaaaaacggaaaagcaagcttcactctgaggggtggaatcttgcttttttacttgagtaaggagaagatatgaaacgttttgattatctgacgcccgttggctttatgttaggctgtattattgtcgcaatcggtattctgtcagggacgggactggcgggaatcagttcatttttagatctgacttcttttttaatcgtcacaggcggccttgctgcggcgatctttatcagctttccgccgagggatttaaagaaaaccccttctgttctgaaacaggtattctcccgtcaggatgacaatgtgaaagagcttgtcagagtatttgtcagcctttcggagcaggcgcgcaggcaggggctgctgtctctggatgaccaggcgcgtgagatcaaggatccgttttttaaaaaagggcttttgcttgcgattgacggctgggacgaggaaacgatccggctggtgatggattctgagatcgccgcgatggaagaaagacacagaaaaggaagacgcgtttttgaaaaagccggtgatttcgcacccgcctggggaatgatcgggacgctcgtcggactcgttctcatgctcaaaaacttaaatgacccgcataccctcggaccgaacatggctgttgcgctattgacgacgctgtacggagcgctgcttgccaacttggtgtttatcccaatcgcggcaaagcttgaagaaaaaacggaaagtgaaattttcatcaaacaggtcatgatcgaaggggttgtcggcatccaatcgggcaaaaatccccgcaacctcgaaagtcagctcgtcgtcttcagctcaagagaagactggcgtaaaggacagcctgcgaacaagaaaaagggcgctgtccatgaagcttagaaaagagcgttttgaaagaagaaacaaaccggaacattccggcggttcaccgagatggatggtgacgttcgctgacttgatcacgctcattctcgtgttctttatattgcttttttcgatgtcgcaaatagacgcggaaaaatttcaatctgccgtttcatcgattcatacaaacggcagcgggggtgaaccggcgtcatcagacaaagcaaacgaaaataaagaacaggatttgctgttacaaaacgtgaagacatacataaaagcgcatcatttgagttcgaaattgacggcgaagcgcgatgagcgcggagtggttctggtgctgcaggaggccgttctgtttcagacgggaaaagcggatgtgctgaaaaacgccgagccggttctgcatcagatcgcggtgcttttaaaaacaattccgaatgacatacaggtagaaggccatacggacagccgccggatttccacctatcaatttccgtcaaattgggagctgtcgtctgcaagagcggcgagtgtgatccggtattttaccgcgaatgaagacttttccgccaaacggtttatctctgccgggtatgcggatacgaaacctgtgaaggacaacaaaagtcccggacatatgaaagaaaaccgccgtgtagaaattgtgatcaaaaaaacgacctcctcataaggtcgttttttatttagtcttataccgctgctcagaccggatggcaaaaagtgctttttccacggtttgggcatttttttctgaaatttcttctttgcggggaatcggaggatataattgttcaggatcactccaaaaagcgggcaacgtgcagggggagtgcttctgccatttatcaatccatttctgcggtatgcgctccccgggatcaatccctttcatctcaagccaaatgcggctccatgctctcgggacgactctccaaatatcgtatcctccgccgccgaccgcgatccatctgccgctgcaatattgatgggctaatgaatgagcgagccgcgggatctcctgataaatggagattgtattggacaggtgtgtcaatgggtcgtaataatgggcgtccgcaccgttttgggtaagaatcacatccggcttgaaaaaagccgcgatttctgaggcggccgtattgtaagcgtgaagaaaggaatcgtcctctgtgaaagcgtccagcggaatgttaaaagaatagccgtagccttgcccgcttcctttttccagtacctgtcccgtcccgggaaataaataacgcccggtctcgtgaaaagaaacagtgcagacatcagacctgtcgtaaaacgtaaattgaacgccgtcgccgtgatgagcgtctgtatcaatgtataacacttttgccccgtagttcttctggatgtattggatggccacggcgctgtcattatagatacaaaagcctgaggccctgccgcggaagccgtggtgaaggccgcctcctaaattgcaggcgtgccttgcttgtcccgtcatgacataatcagccgccgttaaggtgccgcccaccagaagtgacgcggcttcatgcatgccggcaaaaacgggggtgtcttccgttccgagaccgtagctttctccttctgcggcagggagccggcccgcacccgctagttccaccgcctgtatataatcctccgtatgaacgagagccagctcttctttagcggccgcgcgcggtgtgacgatatctccttcgtcaaacgcatccgccgcctgaagcagatcgtatgttaaaagcacacgacgctgattgaacggatgttcctgatgaaattgatacgtctgataagaaggcgagtaaacaaaaacgctgtctctcatggctgatccctcaaatgtttcggccataagacattgtatccggcttcttgaacggcacggataaaagggagcggattcatcgtcttcacccggaagacgagaatgttcgacccggcggactcatggggatagacgagcacactcaggatttgcagctgaagatcacggcacatgcagctgagatcagcaaggctttttgtcatatccgtcaccaggatttccacctgtgatcccggctgggccgcgcctgtcaggctgacgaaagtccggagcacgtcggttttcgttaaaatgcccgtcagcttatggtttaccgtaatcggcagacagccgatgccgtgctcataaaaggaagcggatatttcttccacaaagtcaagcggatgggcgcagatgacattgcgcttcataatggtctccactttgtttgtcagaaacgcgccgcgttccttttgttcaaagctgccggggccggcctgtttaatgtctctgtctgtgacaataccgatgacgtgcagctcgtcgtcgatgacagggagatggcggatatgatatatcttcattttacggacggctgtttcaatggagtcgtgttttgagacggtgatgacgtcccgtttcatgatttgttctgcaatcatctttttatcccctttgtatgtcagtcaatacataaatcgctgataaaaacgaagcctgtcgaactgttcaattgactcctgactgacgtgcctgccgatgcgggccatcagacaattggccggatgagagctgatttccggttcatccgttgcgaaccagacaagacccccggcattcatcatcttttccatgatctttctgtattcccacacatcttttttcattccttttaaatcccaatgccagtaatattccgtcgtcatgatgatgtaccgttccatctgttcatccatcatgctgactgtcagcaaagtttttccgacagaacagcccctgtagccgggagcgacctcgatcgccccgagttcaaggaggtcttccatatttccgtcagaccatcgttcaagcggatcaggatataaatacgtcacatagccgataatcgtctgtccgtccctggcaataatgatccgaccttcaggaagcccggcgatctcgattaacgctttgtgctgttcatgaggaaggcgaaaggctgtcaggccttcatgaaactcatactgtgctagatcccctggaggaacgggcccttctactaaaagagggccggctgctgtctgaattgatgaagaatggtacgttttatgatgtttcactgattcaccgcctgtcggttcttaataaaaacacatctcttttaagcataacaaaatataaagcgttttcaatagtgttgtaatttatattttaaaaattgagaaaactgtgaacatctactataattagtctatagataagcaaagggggatgttgcatgaatttgaaagcgttgccggcggaaaaggggaattatcatctgcgaaattatgaggaaacgtaccgcagcttcgattggaaagaggtcgaagcggcattttcctggcatcagacggggaagctgaatgcggcgtacgaagcgattgaccgtcatgccgaatcatttcgaaaaaacaaagtagcgctatattacaaggacgcaaaccgggatgaaaaatacacatttaaagaaatgatggaggaatcgaaccgggcgggaaatgtactgagacggtatggaaacgtggaaaaaggggaccgcgtttttattttcatgccgcgttcgccggagctttactttatcatgctcggcgcaattaaaatcggtgcgatcgccggtcctttatttgaagcgtttatggaaggcgccgtcaaagaccgcctcttgaacagccaggcaaaggttgtcgtgacaacacctgaactggccgaacggattccggcggacagcctgcccgacctcgagcatattttcattgtcggcggcagcaaagaagcgggagataaaatcattcattatgataaagcggctgagggagaaagcacgagacttgatatcgaatggatggacagaagagacggctacctgcttcactacacatcaggatctaccggaacgcctaaaggtgtgctccacgttcatgaagccatgattcagcaataccagaccggcaagtgggtgcttgatcttaaagaagacgatatttactggtgcactgcggacccgggctgggtgaccgggacggtgtacgggatatttgcgccgtggctgaacggagcggcgaatgtgatcatcggcggcaggttcagtccggaaaactggtacggcacgatcgagaagctcggtgtcagcgtctggtacagcgctccgacggctttcagaatgcttatgggcgccggagatgaaatggcatccaaatttgaccttacttcacttcgtcacgtcctgagtgtcggagaacctttgaaccccgaggtcatcaagtggggacataaagtattcggcaagcgcatccacgacacgtggtggatgacagaaacgggcggacagctcatttgcaattatccttgcatggagatcaagccgggttcaatggggaaaccgattccgggagtggaagcggcgatcgttgacaatcagggaaatgagcttccgccgtaccgaatgggaaatctcgccattaaaaagggctggccgtcgatgatggattccatttggaacaataaagagaaatatgattcttatttcatgccgggcggctggtatgtttccggagattctgcttatatggatgaagacggttatttctggttccaaggcagagtcgatgatgtcatcatgacatccggcgagcgcgtcggcccgtttgaagtcgaaagcaaacttgttgaacatccggcgattgccgaagccggcgtcatcggaaagccggaccctgtccggggagaaattattaaagcgtttatcgcgctcagagaagggcatgagccatccgatcagctgaaggaggacattcgcctctttgtaaaacaggggcttgccgcgcatgccgcaccgcgggaaattgaattcaaagataaacttccgaaaacacggagcggaaaaatcatgagacgtgtgctgaaggcgtgggagctgaacctgccggcaggcgacctgtccacaatggaagattaaagacggcgttgacatcgtatcttatttatgttaaaaatgagtaagcttcatacgaaaaggttttgattgagacaagtaggatatctgattgttcaagagagctgatggccggtgaaaatcagcacataagatatgccgaatacactcatgaaccgcttttgcgaacaaagctattccaaggctttcagtagtgaaagaacggacacggtccgttatcaaaaagagtgataaaagcttttttatgcttttattagtagggtggtaccgcgattatatcgtcccttcgttttaaacgaaggggcgttttttattttcataaacaaaggagcagacaaaatgactaacttattagaggatttatcattccgcggcttaatccagcaaatgacggatgaagaaggactgaataaacagctgaacgaagaaaaaatccgtttatactcagggtttgacccgacggctgacagcctgcacatcggacaccttctgccgatattgacactgcgccgtttccagcttgcaggccaccatccgattgcgcttgtaggcggcgcgacgggactgatcggcgatccgagcggcaaaaaagcggaacgtacgttaaatactcaggatatcgttgtcgaatggtcgcaaaaaattaaaaatcagctttcccgatttttagatttcgaggccggagaaaaccccgctgtcatagcgaacaactttgactggatcggaaagctgagcattattgaatttctccgtgacgtcggaaagaacttcggaattaactacatgcttgcgaaagatactgtaagctcaagaattgaaaccggaatttcttacacggaattcagctacatgatcctgcaatcctacgattttctgaatctgtacagagaaaagaactgcaaactccaaatcggaggcagtgaccagtggggcaacatcacggccggtcttgaactgatcagaaaatcagaagaagaaggggcgaaagctttcggtcttaccattccgctcgtcacaaaagctgacggcacgaaattcggcaaaacggaaggcggcgccatttggcttgataaagaaaaaacatcgccgtacgaattctaccagttctggatcaatacagatgaccgcgacgtcgtcaaatacttaaaatactttactttcttatcaaaagaggaaattgaaggttatgctgaaaaaacggagacggctcctgagaaaagagaagcgcagaaacgtctcgctgaagaggtgactgttcttgtacacggccgcgaagcgcttgagcaggccgttcatatctcccaggcgctgttcagcggcaatattaaagagctttccgctcaagacgtcaaggtaggatttaaagatgtaccttcgtttgaaaaagaccgctctgaagaactgtctttagtagacgtgcttgtggaatctaaattgtcgccttcaaaacggcaggcccgcgaagacattcaaaacggagctgtttacattaacggcgagcgccagacggacatcgggcatcttctgactgcggaagaccgcattgaagatcaatttaccgtactgcgccgcggaaagaaaaaatacttcctgatcacgtactgaaaataaaaagcagtccggccgctcaatgcggcaggctgcttttttatgttttgtgaatactgcacggggaaatgagtacagtacatagtataagcaaaacagggaaggggtgctgcgccgtgaatttcatgtttaccatcgcaaaagaaagattgcagcgggatcattgggaacagcagcaaagcataaacgccgaagccaaagccgaggaatcagagacggaagaagaaaatccgacatcataaagggaaagcccccattctgcggaatggaggcttttgattgtcaccatatcagcctgacggcggccatcagcacgactcctgtgatgaccgtgatggataagctttttgtccgtatcgcgcaaagcaatgtcgggatgagaacgatcattgctttccaatcaaaggtcaaagtgctgtttgttttcacaatcatgctttccgttaccagagccgtcaaaatacaaagcggaataaaggagagccattttaaagccaactcaggcatctgaatgttccggacaaatataaacggaacaatgcgcggcacaagtgtaacaatcatgcagccgagtataatccagatcatttgtgtgctgatgctcatttgtccgtcaccaccccgatcgttgccacaatcacggttgagacgatgaccgcgatgtgtgacgggacgaaatacgataacaagaccataaaaatgatcatatagagtattaaggataggttgtgcttcagcttttccgaagtggacgattgcaattgcagcacaagcagcgccgcaaacatagcgggcaaagcaaagtccaggccgagcgcgtaaggatcagatatccattgtccgagaagcccgcccatcacgcaggaaataacccagcacatgtaagcggttatattgaggccgttcatccacttatcgtataacctgccgttctgagccgctttgttcaccgctaccccgaaagattcgtcagtaagcaaagccccgaagccgatatttttcgccaaagagtatttcgtgaaatacggcgcgatggtcaggctcagcagaaggtgccgcagattgacgataaacgtcgttaaaataatggcggaaatcggactcccggaaacaaggagcgagcaaataataaattgggcggcgccggcatagacacacaaagataacaaacaaatttcaagaatgcttagatgagaggcaacgccaacgatgccgaaagcaaaaccgatgctcatatagcccagcagcgtaggcacacaatcccgcaccccctgtaaaaacgtatcgttcatttcccgggaaacggcggttttttgcacttctgtgttaatcattttttatactcctttcatagagattataatgataacgactaatgaaaaaatcaaagaaaatacggttcacatttatatgaaccgatttccggtgacgacatgaaataacgaatggttttgtttcatcaggccttcaactttctcagccccgacttctttcacaagctccgcgaacatcagatcgtgcctcatatattccatggccacgagaacgagagcgggatcttctgatttaatggcccaggcattcgtctgcggagaaaaattggcgattaagacttctttattatcgcgggcagctatcgttaatcttccgcccatccgtttctccgccacttcaggtgacatattatgatttgtcgtatttccgagcttcacttccggagggccgaacacaatcgaaaagacgggcaattgttcggcggcgcgtttgttagcagcttcttgaataaagggaatctgctgttcccagacagacagccacaactcttcctcggctttttcaatcatatccttcatctcattgatgacatgatcattcgtgctgatgcggcggatgacattcatctcctgctcgctttccagtgccaataacttttcctcaaggtagccgaatgagctctcgaaatcgtgccggagccggtcgattaattcctttccggcaagcggagcatatgtaaccggatcagacggcacaatatggacagcgcctttatcaactaatttccccaatacttcatagatcattgagcgggggacgcctgaccttttgctgatttcatatccggtaacaggcgagtgtttcaacaagccgatatatgctttacattcatattgagaaaatccaaacttctgtaattctttcagaacatcctccataaacatcctccgtagtggttattcatgaaactactataatgtaagcggttatatcttgtcaatgggacttgagtgctgaaagaaaggtgcgcctgttttgtcgctttccaacttagtttatggtgagttacatgtatggcttttgtgaaaaacgttgccgtagacccacacgaatgccgtttgatacgataaattcaagaagttaaaaagaggaggatcacggtggaaaacacctctaaaatcgcttttttatcggttataagcaattccctggtcgtcatgctcaaaatagtggtggggatcataaccggatctgtcgcgatactttctgaagccattcattcttttttagatttgatcgccgccttcattgcctttatctccgtcaggatttcaaaaaagccggctgatacagggcatccgtacggtcatggaaaagtcgagaatctgtcggggactatcgagacgattctgatttttgcggcagggatttggatgatatatgaatgcgttcaaaaactggtgaacccggcgccggttcatctgcctgtattgggaattgttgtgatgcttgcgggggctctcattaatttgatcgtttcgaagttcgtaaaaagagaagccgaaaaggttaattccgtggcaatgaaatcaaatgccctgcatttactgactgacgtgtacacatcattaggcgtagcggcaagccttttggtcgttaccgtaacggagtggtacatacttgatcccattataggtatggtgctggcggtgtatatcatatatgaagcgtttaagttaatgaaagaagcattcccgccgctgattgatacccgtttgtcggaagaggaagaaaaaacaattttaaagattattgaaacatttcaacaggaatttattgaaattcacgattttcgtacaagacgctccggcccgcaggagtatattgattttcatctggtcgtagcctctcacgtgacgattaaagacgtgcatgacctgtgtgaccgcattgaaagagatattacgaatgaattcaaacaagcacaggtaatgattcaccccgagccggagagcgagaggaagaaataaatcgatcttaagtttgcgtttgttcccggcaaaatgcctgcaaaaggcccgttcccacgggtctttttgttgtataaatgactatttctcgctcatatgagagataagcttatacacgtgaggggttcatttcatacgttatgttgtaaagaaaaagggaggtgaacagaattgaacgctatttctgttaaagaaattgaacatggagttgccgttgcggaaagagaaggtttaggggagtatttataccaagaaccggtttctaaaaaatgttcgcgccgttcccgcagcagaaaacggacacaccgttctcgcagcagaagacggacgcatcaccggacacaccgttcccgcagcagaagacggacgcatcaccggacacaccgttcccgcagcagaagacggacgcatcaccggacacaccgttcccgcagcaaaagacggacgcatcgccggacacaccgttcccgcagcagacggtctcatcaaaaacgtagccgcaaacgctgttttaaatgctgactgcagactctattacaagtaacggggatctgctataatggcaagagaactgcataaaagatccagtatcatcatctgcggacactgaactgacaacatggcgctgtttgttcgtgtccgttttttatgtcaaaaaagatgccggaggataaaaaggaagggatgacgccgaatgaagctgaatgaggatttttataactctgaaggaaagacagtctctttgccaaacatcagcagcaagcttttgcatatcacggacagcgggcatatcagcgttgacttcatcagcataagcaggctgcggaaggcttcaaaaatcgcgatcttaggtgacagcgtcgcccgggggctgcgtgcggaatacggctttggtgacattctgaaagaccggacaaacgctgaaataaccaatctgtctgtcagcggcgttaatatgagcaacaacggaagcgataacatttatcagcaggcgcttaaaacaaagggacatgatgtcatcattgtccagggaacagatgatgattggtgcaaccacattcccatcggcacagatgaaaaggatatcaccacattttacggaggcttctgccaagtgatccagcagctgcggagcggaaataaaggcgcgagcatcattgtggtgaccccaacgagacaagcaaaaatgtcaaaaggaaaaatcgtccgccgtgatactgataaaaataaactgggcctgaagctggctgactatgtgaaagcccaaaaagaagcctgcacactcctctctgtaccatatgccgatctatttgatactgatctcatcgacccatataatcccgctttccgcagcatgtgcatgtcagaaggtcttcatccgaacgagaaagggcatcaaatcatatttcaggaaatctgccggaattattattactattatgggtaacacagcgctaacagattattttcggctttgcttttctaaaagctcaattattctttgagatgcgtgtttttgcgctctcaaaagcgagacgatattaccggtaaaaccgattaaaatgataagcagcaaaatgatcatccacatagcgaacctcctgtcgagtgttgaaaaacccactctttattttacttattatggatggggagagaataggtctaactattgggatttctttataaatccataaaaaaatgaacagactgaacgggtctgttcatttttattcgcttatttcagcaggttcaatgattcgcgattaaaggcttccaaatcgtcaggtgttctgcttgttacgatgttatggctcacgacgacttcttcatctttataatgtgcgccggcattgattaagtctttgcggatgctgcggaatcccgtgatatcttttcctttaagaaggtcggtatcaatcagcagctgcgggccgtggcagatcgcgaaaacgggtttctgattttccacgaatgctttagtgaattcacccgggcggtcatctccgcgcagaagatccggtgaaaagcctccgggaatcaataacgcatcgaattccttggcgtctgcgtctgagatcgcttgatcgatctttactttctcaccgtgcttgcccgtcacttctttcccagcttccaaatctattgtcaccacactgtggcccgcttctttaaatgcttccgccgggcttgtatattcaatatcctcaaattgatctgtcatcagaactgcgatttttttgctcatacatcatgcctcctgtgaatttgtatatgacaagaatatcaggcagattcccgcctcacaacgtatttgcttatgaaaaaagacccctctgaaaaagaggagccaaaaggtacggaggtctgcttaaacttacgtgtttaacctgagataaggcaagaaatcgaaccaattactttttgcgtctttttttctgctttttacacccgcatttccccggatcgcccggatcaatgacttcgtgaattgtttcttccttataaacgtggcggggaacataacggatatgctctctgttaatgtgtttgatgggatggacgtaaaccacttctttgtcagtatacttgtcagtcacaatatacttagggtcacagtaatacactttcgattttttacccattcatctcacctcccgtactttattaaatgctgacaaggaggattttgcatcggacaagtacaccatggcaagtccacaatttttcagctgcaatttcgtttttctgatttttcctgaatccgcctcaaattggaacggctaaccctttttgagcggggaaatctataaaaaagaattcaaaaacgattcttttctcaggtcaatcgagatgcatacatctttagggggatttcagaatgctcgatgaaaaaacgattgaaatcattaaaagcacagtgccggtcttagaagagcatggtgaagaaatcacaggccgattttatgacctgctgtttcagcatcaccctgagctgctgaatatctttaatcagacgaatcaaaagaaaaaaacacagcgtacggccttgtcgaatgctgtgattgcagccgcagccaatattgaccggctggaaaacatcgttcccgtcgtcaaacaaatcagccataaacaccggagtatcggtgttaaacccgagcattacccaatcgttggaaagtacttgttaatcgcgataaaggatgtgctaaaagacggggctgctcctgaggtcattcaggcatgggaaaaagcatacggcgtcattgcagacgcttttatcggaattgagaaggacatgtatgaacaagcggaaacgcaaaaaggcggctggaaagactataaggcgtttaaaattgataaaaaggtaaaagaaagcaaggagataacgtcgttttatttaaaaccggaagacggacaagttctccccgagttcaaagcgggacagtatatcagtgtaaaagtatacattccggacacgggttatacgcatatccgccagtacagtttgtcggatgtatccggtaaggattattacaggatttccgtgaaaaaagacggaattgtttcttcatatctgcatgaccaattacacgaaaaggattcaattgagatcagcgctccggccggggatttcgtattagaccctgattccaaaaagaatctggttctcatcagtgccggtgtcggaattaccccgatgatcagcatgttaaagacggttgccaaaacccagccgcagcgaaacgttctctttatccatgcggcaaggagcggagagtatcatgcgttgcggcatgaagctgaagaagccgcggaacactcatccgttgacaccctctttatttacagtgagccgtccgaacaagaccgttcagaaaacattcgttttcgggaaggccggattgacaaacagctgttagaagaagtgatgacagataaagatgctgatttttacctgtgcgggtcaccgtcgttcattaaagaaatgaaaaagctgatttctgaattcaatacaccgccggaatccattcactatgaattatttgaaccgcagctgagtatggtgtgattgaagaaggaaggacgatgattttaatgtatgaagcatccggactgggtgctttttttattctcttgcaaggaagggttgctgaggaatcactctgtagaggaaaaccactttttgtctcaactcgcttaattatcgaatgaaataagtgccgcatgttaaaaacacatggcccgcgagtttattgctcacttatcctgctgctcggatttttggtgtgtgagaaaaaaacggtacggctgcataatccggaagagacgctgaccttttacttgtaaaagaagtttaaagacaggatgaacgcttatttgctagtgtacgagcggcaaaagcaaaaagaggaatcagtattttaaaattaaaaataacaactgatagaaatgaaagtttcaggatacaatgggatttatatattcgggttttgtgatagcagtatagggaggggaataatagagtgagtaacttttttgaggaatcggtacagggaggggttgtatctatgcttactgatattaaacaaaaggtttggggatgctcttttatctgagaatcgatttgagatgaagcggggatgccgaggggatcagagggcgaacgtcaggcagaattacgccaagtggaccgccgagaaaaatggctctggaaatgtgaatctattgttgattttcttgattgagctactgaagaaatagttgacgagaaacaccggactgtctttgtagtagacggggtgaaatatcgtgaaatcgctctgcattctggcgtttcccgcgaaacggtcagacgcatcaaagagaagattttttgccaaatatgtaatttttattgttgaaacagataaaatccgcagtgtagactggaaggcaaaatatttctgcgtccccatcgattcaaatagggattacaataatgtgaagagttatttataaacagaaattgataaataatataagatcagctgacaaacttaatgaggatcaaactagtgctcacttatttataaattaaacatattataatgatatattaatcattaagggagatgagcagctgatgggttatgatcagcatagaagatgccctaaatgtaaacaaaaactaccgaaaccaaactgctgtaagtgctgtcccatctgttatacaaaagttattgtaggacaacgaggattacgaggggtgcgagggattccaggggttacaggaccagccggaccagccggaccagccggagcgaccggggccacaggagctatcggtccagccggagccacaggagcgaccggggtaactggagcggcgggagtcacaggagcgaccggggccacaggagatatcggtccaaccggaccagccggagccacgggagcagccggagccacgggagcgaccggggtaactggagcgaccggggtaactggagcggcgggagtcacaggagcgaccggagatatcggtccaaccggagccacgggagcgaccggggtaactggagcgacgggagtcactggagtgaccggagccacaggagatatcggtccaaccggagtcacaggagccacgggagcagccggagccacgggagcagccggagccacgggagcgaccggggtaactggagcggcgggagtcactggagtgaccggagccacaggagatatcggtccaaccggagcgaccggagccacgggagcgaccggagccacgggagcagccggagctaccggagcgaccggggtaactggagcgacgggagtcactggagtgaccggagccacaggagatatcggtccaaccggaccagccggagccaccggagcagccggagctaccggagctaccggagccactggagcgaccggggtaactggagcgacgggagtcactggagtgaccggagccacaggagatatcggtccaaccggagcagccggagccaccggagccacgggagcagccggagccaccggagccacgggagcagccggagccaccggagccacgggagcagccggagctaccggagccaccggagccactggagcgaccggggtaacaggagcgacgggagtcactggagtgaccggagccacaggagatatcggtccaaccggagccaccggagccaccggagcgaccggggtaactggagcggcgggagtcactggagcaaccggagccacaggatctgggctatcagaatatgcttatgtgtacaatctaagtgcagaaacggtagctatagaggctccggtaatttttgactcaactggaatcactactgctggcattacacatgcccctggaacagctcaaattatagtaaccactccaggagattacgaggtcactttttcagtctcgggtgtagagcctaaccaattcactttatttgtaaatggagggccggtgacgaacacagtttacggttcaggagctggtactcaacagaacaatggtcaggccataattactctagcagcaggtgacattcttactcttgtaaatcatacttctgcagcagcagttactcttcaaactttagcagggggaacgcaaacaaacgtaaacgcttctattgttctcaaaaaattaaattagataagtggtttaaatctccatattaaacaagaaatgagaatgacttaaaaaagcttatagagcttaatatacagctttagaaggatgaagaaatttaaaatataagcaaactcatctaatttttttatataaggtattatggtaataggtaataaacaggcaggcgctttcccgcaggggagggtgctttaaatttaaggacaaaagcctccaactgttaagcgagtcaacacagtaggaggcttttctcttatgggtggtacagcagcagtattctcttacaaatcaaatattcccagaaagttatggcagtattcgtctctcgagtaatgaaaaaagttttatgttctctgtaaactgcgtccggtaaatctcgggataaacgattggcggttaacgactgagtacgggggcagtttagaaagaatatgattggagggattacataaaataattagtcaagccttagaggaattaggaaagaatgtgaggtgtgcggctgaaagggtgccaaatctcaaccctgttattatccataaaaaagacatggcagcgcaactacaggaattcagttcggatttaggcttgtcagcagatctccatcattgcctagataaaaaggtaaagaacttattaacggcgtatatggctcacaaacggcatatgcaatccatgattcctgacggcatttagggttaaaacaaaagcaaagcgcgaatctctactaaacagttactttaggacttctcaaaaaggaactcctattaaagggagcagggttaattttcaaattgtttaaataaaagtaaaaatatagtatgttagaccagaaaacaaatgaaggaggatttgtatgaggttgttaaaaaactcaatctgtttacttgtcgcaactctattgtttgctattggattttcgccgcaaacgaaagcaacacaagagcactcgtttggattagcaaaaccagtaacctttgaagaaaaagaaactttaacagtaaataagaatggagtggctaagagcaataataatggccaggcttccgtcattaaggaggcacgacaacttgccaaacaggatagccacaatgaaataacctataagagccccttagctaaagaagaaaacaacattgttaatgtgccagtcgttgagaaaaaagaagagaaagcgcacactaaagcagctagcttagttacgatgtcctacacaacaatatatgaccccaacaaaaaatccacacaaccacaattaaaatagcaagcatagttggcgaaaagccgatagttatcgaagcaagaaacgatttatatgaaagtaacacttatagcggaaaatatggaagggtttttctccataacagagaatttttaggaaaagacattaaagtaggtaaatcatattcaaagtcgtattatcctaaaaagacaaagttgatccaaagtggaattggagttgattcgatattcaccatgtgcttccgctaaagtatgggggaaaaaataactttaataatttgtatcctctccctcgtgatatgcaccaaaatctattaaatccttggtgggataaatattaataagtaagaggtggctcaatggcagtttttgttgaaaaaacgctccaaggtctaaaagaattaattgatgaaaaaggccgcttaaaaattttagggaatgaaggaactcttttagagacagaatgtactttctctaaaggtgcaacagatctggagattgagagttttgagaagaaaataaaagtctcacttcctgaagattataaaacctttttaaaattgcataacggagccagaatatttgatttgttgatttacggtgagaatgcaggtgggggtttgcatattcttaatttagaagagattgaaaagtatatgcaaaatggttttttagagcctcagtttattcccgtctcacatctgttagacggatgttatttgttaattaacaaaaccaaaatgtccacagatccaaactatttatggttccgcagatttattgagtatgaaccaatgcaacttaattttgagatatttttagataggtatattttgtctcaaggatcaagtttttgggaatggaatatctatactgctgaaaattattataggactcaccagggtgatgaggattaacctttcctacagttgggttggttcatttttactattagacttcgatttgaacttttaaaaataggtttaatttaggagacgaaccgattaattggtgtatagaggatttataaaaagcgcagatactctgcgcttttttatttaagtattttccgaatcattcgcagcccgtttttggaagaaggataacggaaagcgaagtcgaagcggttcgtttgtttgacgacgctttttttgtgcgtaaacgtgttaaagctgtcaaatccgtgatagctcccgatgccgctttccccgacgccgccgaatggcaaatacggcgtcgcaacatgcattaacgtatcattgatgcagcctccgccaaacgacagattctctaaaacagcgcgctcagtttctttgtttgtggtgaagagatacagagcgagcggctttgggcgcgattggactttctcgatgacttcatcgatatcaccgtatgtaaacagcggaagaatcggcccgaaaatctcctcctgcatcactggagagtcatccttcacttgatctagaatcgtcggcgctattttgtggtgatcaggattaaattgtccgcctgtaagcgggacgccatcattcagaaagctgagcagccgctgatagtggcgttcactgacgattttgccgtactgcggattttgttcaggctgaggaccgtaaaattcgctgatcgcacgcttcatttcttctgtgagcttcattttgatatcttggtggacaaataaataatccggtgcgatgcaggtttgccctgcatttgtaaatttcccgaagataatgcgtttggcggcaagctgtatatcagcatccttatggacaatgcagggacttttgccgccgagctccaaggtaacgggaattaattgtttggcggcggcctccatgacgatttttcccacggcaacgcttccagtgaagaaaatatagtcaaagggctgctgtaataactcagtgctgacgtcgggcccgccttctgccatagcgacatagtcactcggaaaaacgctgctgatgagtttggaaagaacagcggaaaccgccggcgtatattctgacggtttgagaacgaccgtgtttcccgctgcaatggctccaatcaacggagaaagcgccagctgcaagggatagttccaaggcgcaatcaccaaaacggttccatatggctcagggataattatgcttttcgagcctaggtgagtcagaggcgttttgactcgtttcggtttgatccattttcccagccgcttcatcacaaaactgatttcctccagtacaattccgatttctgtcgtgtacgactcctgttcggatttgtggagatcctgatagagagcggctgttatatcggcttcttgtgttttgatggcttgtttcagcttttgcagcatgttcagtctcgattctagctgtctcgtatgccccgccgcaaaataggctttgtgcttgctgacgatagaggggatgctgttcattcagtcgctccttttttgtaaggtatgatgattcattatgtaaaaaatcgcttctgcttgtcaaatgggtttttctaatgtacatgtagctgaaaagccagttggcacataaaaaaagcccctgtccggggctttttttaataaagagagggagcatctgtccattattctgacagcccaaaagaaaaaccccggaaacattgtcatcacaacatgtccggggtttaatccaatgctctttaaagagcgttttacttaacgggagtagaactcaacgataagcgcttcgttaatttccggagcaagctcagagcgctctggaagacgagtgaatgtaccttcaagcttttcagcgtcgaaagtaaggtactcaggaacgaagttgtttacttctacagattctttgatgatagaaaggtttcttgatttttcgcgaacaccgattgtttgaccaggttttacttggtaagacggaatgtcaacgcggcttccgtcaacaaggatgtgaccgtggttaactaattggcgtgcttgacggcgagtgcgtgcaagaccgagcttgtacacaacgttatcaagacgtgcatctaaaagaatcatgaagttttcgccgtgtttaccagtcatttttgcagctttgtcaaacaatgtgcggaattgacgttcgtttacaccgtacatgtgacgaagtttttgcttttcttgcaattgcaaaccgtattctgatagttttttacgctgtcccggaccgtgggggcctggtgcgtaagggcgtttttctaattctttacctgtaccgctaagagagattcctaaacggcgagacagtttccaagatggacctgtatagcgagccataatgtgactcctcctttggttttattttgtggaaaataaaaaccgtctgttcgatccgaccgtgcacattttgttttcatgtatcctcgctccagcagcagagagttacacgatacaccttacagctaaggaacaaaatgcaaacacagaagctgaacaaaaaggctgcaatatttcacacaaagaacattatatgatttttccccgccgccgtcaaccatttctccatgaagagtgccggtttatgatataatgtacaaaaatgagtagtacatgtttaggtgataaaaatgaaaaaacaaacaattgatgaagtgacggcctttcatcagaaaatgctttcttttttcttaacgaaatctgaatccgtctcattatccgactcgctgttatggctggcctcagctctagaatcctgctttacatctctttcattgaccctttcaccggcagaatcaacacgtttcaccataaaaacagaagatgaaccgcattatgctccgctgaaagagagtgacggccgttttatgatcaggaatcagacctccggcagatccttttatctgtgctcggaaggcgggctgccgatcccggaatcattgcctgagatcgttactcagtttattaatcaatctgtgagacaaagcgggctgtttgacaaaacgaagcatcagcggaaaattcacagaatgacagaaatgttccattcgcttttggaccaaaatgaggttttggaaaaactgcaggcaagtttgagtacggctttccggtctttccgtttttcactgtttatcacgcaggatcaggatacggacagacagcttcccgcaaaagaattacatatggacggaaaagatgccgatccgtctgccctgaaggtttatttatcggggagactgctcagaaaaggcaggtcatctgcttatctgccgatcaaaggccagcaggggacttacggggttctgaagacggaggggctgcaggatgccgttctttcgtgcagtactctcagtgaaatgctgctgcttgcgggcgcagcgggaaaagcatttgaaaatgcgcagctctatgagcaatcgaaaaaaagcattgcgaatctggagctcattaatgaaacatcgcgccagctgaatcagcgcctcagactcactgatacgatgcgggagctcgccgccattatgacccaatcgtttcatgcggaagaagtggctttttttcatattgatcattttgagacgcaaaatctgcttccgggacataccgctttttttaagacagaacgtgcgaacccctatatcagcattgtgaaagaaaagctgttcgagggagaaaagggcgtgtttatcggcagcggaaagactgtattcggcgaaaacggtttcggctcgctgatggcggtgccgatgatcgaaaatgacaccgtcttcgggttcgcgattttattgaaaaaggatttgtatgcttttacgtttgaaatgtataagctttttcaagcgctcattcaccatgcgacattggcggtcacgaactccatgctgcgcgacaggcttgagcatcttgttcagacagaccagctgacggagctgtattcaagaacctatttggatgagaaaattcaatacagcatgaaaattcataaacggggtgtattcatcctcgttgatatcgataatttcaaaaatattaatgatacatacggtcatcaaacgggagattcgatcctgattcaggtggcctccgttatgaagaaccatattcgtgagcatgatgtcgctgcgaggtgggggggcgaggagctggctgtctatctgccgaatatcaacgtgtcatccggagaacgcatcgctaaaaggctggttcgcgccatccgggaaaataccgagccgcgcgtgacgatttcctgcggcgtttcctgctggtcaaagaccggcccgatgccgttgaaattgctcgttcagcaagcggatgaggcgctttatatcgccaaacggaacggcaaaaaccggctgatcatccatcaaaacagcacgacgacataaaaaaggagccggcctgccggccgggctcctttttttatcctaatcgtttttcaagcgtttcaacaaactttgctaaataggtttcgtccgtttcatcaaaacggtttttcacggggctgtcaatgtccagcacaccgatcacttcaccgtttacgcggatcgggagaacgatttctgactgggaagccgcgtcacaggcgatatgtcccgggaacgcattcacatcggcaatccgctgcacgtcgccattagagtaggcagtgccgcatacgcctctgccgaacggaatgcgcacacaggcaggaagtccttgaaacggtccgagcacgagctcgccctctttagcgaagtaaaaccccgcccagttgacttcatgtaatgaatggtataaaagcgctgacgcattcgcgtaatttgcgatcgcatccgtttcatcttctgtcatggcttcgagctgtttaagcagaagctgataacttttttctttatctccggattgtttttcgacatgaaacatggaaaaccctcactttttctataatatcaaacaaagttccggccgttctgccggcatttgtcgagaagttcttacaggaacggcgcctttctgcttgaattgttacacataaaggggtgagccgtatgaaagtaagcactaaagacaaaattattaacgccgctgtccagctgtttaaccaaaaaggttattccggcacgtccgtccgtgaaatcgcaaagtcagctgatgtaaatgttgcgcacatctcctactattttaaagggaaaggcggattaatggaacatttagtttccgagttttacgaaggctatactgaagcgctggaaaaagccgccgtcagtatgaagggtgaagacgcgcaggaacgcatcctgcgggtgattttcgatattttatcctatcagcacgataaccgtcaattaacgcggtttgtataccgggaagtgacgattgattccgtgcttatcagggaaattatgtctacttacttaatgaaagaaaaatatattttccagctggtgattgaagaagggcagtcacgccatagacggctgacgctgcccgtgccgcattttattctgcaattgaaatccctcttgatgatgccgtatctccagcctcaatatattacggaggtgctctatatgcagcctcatgagccgtacttttataaaaggtattttgaagaggtgaagatctggatcgaaagcgtgttccgacggcctgatgcggcgcttatgaagtaatgatgtttttgtacgtttcgtaggaactgccgacatcttccgcttgatgggcgtccgacccgaatatgagcgggatttttttttgcttcgccgtctcagccatccaatcctccatgtatacttccccggcaaacttctttctgagcccggatgtattcacatccagctccattccgtgttctttcacggcgtcaagacagcgggccgcaagctctcttatttgaggtgacatgctgtaagggaaaaggcgcgcgaattttttgacgagcgtgatatggccgacccgttttggcttaaaggggccgagcggtgttacaatggaagaatacacggtttcatagtattgttcatatacggcttcaacgcttccgaagcggtcggcaagctgctgaaaggcgtgctcgtcaaaatcgaggcatatataagacggaccggttttcaaaaaatgaacggataaaatgccgtcatccagtgaggggccgtacgtgttcagaaacgccgcggtttcctcttcataccctgtgataaaatcggtttctagcccagtcagaatgctgatttgtccatcgtattcctttttcagctgtgacagccgctccaaataaacctccatctgtctgagatccatcgcgctgtcctgaagcggtacgggatcttgaaatgacggaggaaggggggcgtgctctgtaaatgtgatcgagtcaaagcctctttccagggccttttcgacatattgtttcagcgcatccttcgagccgtgagggcaaaaaggggtgtggatatgagcgtctcgtttttccatttgtgtcactccattaaaaaattgcagaatcctgccgaaattatgcaaaaagtttttgatttctggtcaaaaaatgttggttacatggtatcataataacaatgaaaacgacagattttctcaatacatatattgaaatctttctgaatacataaaacaccctgacagattaagagaacaacaagggggctcattatggagttagtcatcggattattggttatactgctcgcgctctttgcggcgggctactttttcaggaaaaaaatttatacggaaattgaccggctggagtcatggaagattgaaattttaaaccgttcgatagtggaagaaatgtccaagatcaaacatctgaaaatgaccggagagacggaagagttctttgaaagatggcgcgaagagtgggatgaaattgtcacagcccatctgccgaaagtagaagagctcctttatgatgccgaagagaacgccgacaaatatcggtttaaaaaagcgaatcaggtgcttgtccacatcgacgacctcctcactgctgccgaatcaaatatagaaggcatactgcgtgagatcagcgaccttgtgacgagcgaggaaaaaagccgcggagagattgaacaggtgcgtgagcggtattcaaaagcgcggaaaaaccttctggcgtacagccatctctacggagagctttataacagcctggagacggatctcgacgaaatttggagcggcataaaagagttcgaagaagagacggaaagcggcaattacatcaaagcgagaaaagtgctgcttgaacaggaccgcagactggatcagcttcagacatacatagatgacgttccgaaactgcttgcggactgtaaacagaccgtgccgaaccaaattgccaagctgaaagacggctaccgggaaatgacggaaaaaggctacaaattggagcatattcaaatcgaaaaagagctggagaccctcacaaatcaattgaaacgggccgaaaacgcgcttttagaagaattggatgtcgacgaagcgtccgccatccttcagctgattgatgaaaccattcaatcgatgtatgaacagctggaaggcgaagtggaagccggacagtccgtattaagcaaaatgcctgagctgatcatcgcgtatgagaagcttgaggaagaaaaagaccgcacaaaaaccgaaacggagctcgtcaaggaaagctatcagctgacggcgggagaaatcggcagacagcatgccttcgaaaaacagctggaaacgatcggccggctccttgagcaggcgagagaaaagcttgacggcgagcatgtagcttactcgctgctgattgaagaagtcgaggccatcgaaaagcagatggaagaggctcagaaagaacatgccgaataccgtgaaaatctgcaggcgctcagaaaagaagaactgcaggcgcgggaaacgctgatgcatcttcggaaaaccatttctgacacggcccgaatgctgcaaaaaagcaacgtgccgggaattcctgaacaagtcaaggacaagctcgagacggcaaatcatcatatagaagaaaccgtcagccaattggaagagctgccgctgaacatggaggaagccgccaaacatctggctgaagccgaaaaggtggttgaggaagtcagtgaagaggcggaagatcttgtgattcaggtgaagctgattgagcggatcatccagtacggcaaccgcttccgaagccagaatcatattttatccgaacagctgaaagaagcggaacggctgttttatgcttaccgctataatgaagcttatgagatggcggcagatgctgttgaaaaagcagctcccggcgccgtgaaaaaaattaaagctgatcaatctgcttcatagacgcataagcaaaaactgcaccctgatggaaatcagaggtgcagttttttagtttctcacggaatataaaaagcgcctgcggctgatatacatcaaaccgcaggcgctgaatgttacgattttgctttatttaattcgatgggcgggctggtaaaaaacgtgataatgcagccgatgatcgctccggcaatgcccggaagcacccagccgattcccatgctgtaaagcggaagatttgcgtttaagaatgaatctaatgatccgagcggaatgccggctgccttcaaaccgtccaggatactgaacagccccgttccgatcaggcaggcgatatagacttcgcgtctttccttaaagattttatcaataaaggaaaggacgataatgacaatcgccagcgggtaaatggctgataaaataggaactgaaaatgcaataatctcagcaagtccgaaatttgaaatcgccagactgaacagcgtgacaatcgtaaccaccattttgtatgataaagctggaatcaattttgaaaaatattcgccgcaagatgtgacaagcccgatgcttgtcgttaaacacgcaacggtgatggcggcgccgagaacgatgtttcccagtgaaccgaacaggtaatcagatgaagctgataaaatctttgcgccttcgccgagcggccccacagcgtccgtgcttgtcgctcccaaataggccaaagataaataaatgaatgtcaaacctgccgctgcaatcagacccgctttaatacaagcggcggcgagcgctttacgctgggtgacgcccctgcttttaacagcgttgacgacaacgacgccgaagacgattgaggcgagcgcatccattgttttatagccttccaaaaatcctttgaacaccggcgttccggaatatgcctgatgtacggcgcccagcccgcccatcggagtgacaatggcttttacgacgatgattaaaataataccgaatttaataggagtcaaaatctttccgactctgtccacgattttggaagggttaagagctaaataatacgtaatagaaaaaaagatcaacgtgaaaacaaataaagataatctttccggaatgccgcttaaaaacggaactgcaccgatttcatatgaaacggttccggttctcggaatcgcgaaaagcggcccgattgataaataaagcacaacggtgaaaatagtcccgaataccggatgagctttatcggcaagccctttcgcgtctttgcccgttaatgcgatggcgataatacccaaaagcggcagaccaacgccggtcagtaagaaaccgcccatcgctttccagacattatgccccgccgcttgcccgagctccggcggatatatcatatttcctgccccgaaaaaaagtgcgaaaagcatgaaaccgataataacggtatctttgacaggtagtgagtgtttcataaaaatcctcctaaatactatgttgaaatattctgtcaattaattgtcagataatataacaaaacgaacattacttattatatggcaatgtacagagaagtcaatactcgatttattgcgaatttatatttacttttgttatggtagcataaatatcatacgatgtaccgttttcattaaaggagtaaaaaaaatgatatatttagacaacagctcaacgaccgagccgtatgaagaggtattggatgtgtacaaacagacgagcagccgttatttcggcaatccttcgtctctgcaccggttaggaactgagacggaacagctccttgaagcggccgctcagcaaataaaaaaaaccttgcgtttaaaaaattatgatattgtatttacatcgggcgcgactgaagcgaataacgctgcgttaaagggagcagcctgggcaaacatgagtaaaggaagacatatcattgcttcggcgattgagcatccttctgtgacggagacgcttgatcagctgacagagctgttcggctttgaagtcacatatcttccggccgatcaaaacggcttcgtttctttgaaagacgtcaaatcggctatcaggccggatacgataatcgtcagcgtcatgcatgtcaataacgaagtcggctccattcagcccgtaaaggaaatcggcgggtttttaaagcagcaccggaatattctgtttcatgttgatcatgtgcagggcattcataaagttcccctgtctatagaagaagcgggcattgacctttgcaccgtttcagggcataagtttcacggcttaaaagggaccggagcgcttatcgtcaaaaaaggaacgcggctcattccgcttataacaggcggctcgcagcaaaaaggcgtccgcgccggaacggaacacacggcaggcgccgtttcccttgcgaaagcgatcaatctttccgcgcgtgacatgaacgagcggctttcttccgtggaggctgccaagaatgcgctcatggaaaggctgagcgggacggacggggtcgtcatcaacacccccgctgaaagcagcgcgccgcatatcattaatttttccgttccgggcgtgaaggcggaagtgctgctgcacatgcttgaggaaaaaggaatatatgtctccacaaccgcggcatgttcggcaagagagcacaaaccgagccgtgttcttctgcaaatgaataaaggcgaacagattgcatcaagcagcataagagtcagcctgaacttcagccatacggctgacatcacggagccgtttatggccgcgctggcgccggctgttcaaaaactaaaaaaaatgatgaggtagcatatgaattacgatcatattttaatccgctttggtgaaatatccacaaaaggaaaaaacagacgcagttttattgaaagattaaaacagaatatccgcctggtattaaaggattataaaaaagtaaaatacttttcaaaccgggaccggatgtcaattacacttaatggagaaaacctggaggaaatttgttccttattaaagaatatattcggcattcaaagctttagtctcgcaattaaatgcgaaagcaagctggaagacattaaaaaaacggctttagccgcgatagaaggcgaatataaaccggggaatacgtttaaggtcgagaccaaacgggcttacaaacagtttgaattagatacgaatgcgatgaacgctgaaatcggcggccatattttgaaaaacacggatggattaaccgtcgatgtgagaaatcccgatattccgcttcggattgaaatcagggaggaagcgacattcctgaccattcgtaacgaaaaaggcgccggaggccttcctgtcggttccgcgggtaaagcgatgctgatgctttccggcggttttgacagtccggtcgccggtttttacgcgatgaaacggggattatcagttgaagccgtacatttcttcagtccgccgtatacgagtgaacgggcaaagcagaaagtcatggatctcgcgggatgcctcgcgaagttcggcggcagtatgacacttcatatcgtgccgtttacaaagacgcaggaactcatccaaaaacaaatcccggagaactatacgatgacggcgacgcggcgtcttatgctgcaaatcgcggacagaatcagagaagaacggaaagcgctcgcgatcattacgggagaaagcctcgggcaggtagcgagccagacgcttgaaagcatgtatgcgatcaatgcggtgacggcaacgccgattttgcgccctttaatcggaatggacaaaacagaaatcatcgaaaaatcaaaagaaatcggcacttatgaaacgagcattcagccgtttgaggactgctgcaccatctttacgccgccaagtccgaaaacacgcccgaaaaaagaaaaaatcgagcacttcgaaagcttcgttgattttgaaccgctgattgcagaggccgctgccggcatcgaaaccatcactgtttactcagagcaggaagctcacgataagtttgccggcctgttttaaaactgtatacaattaccactgtttactcagagcaggaagctcacgataagtttgccggcctgttttaaaactgtatacaattaccaaagtttttttgaatgaagacatgtgttttatcacattctatactcacaaggaggtgatacacatgtcacaacaatcaaacagcggaaacagcaaccagcttttagtgccaggcgctgctcaagctatcgaccaaatgaagtatgaaatcgcttctgaattcggtgtaaaccttggaccggaaacaacttctcgcgccaacggttctgtcggtggagaaatcacaaaacgtcttgtctcttttgctcagcaaagcatgggcggaagcagccagcagcagttttaatcacaacttcacataatggctaagagagcggggaattccccgctcttttttcatgagtatagatagaaggcgggaagcaatttatgcatatttttattgtaatggcctatgtttatgtataatggggaaagaaagtgaggagttgttcgtgttaaaacgagaagatttaatcgccccaaagaactataaccttgtaaatgaaatcgaaaagttcagccgttccaaagagaagaacgcgcttatttgggaagatcaaacaggcggcaagaaagtctggacgtatgaaaaattgatggaagaaacgaataaaatcggagcccgcctgaaaggtctcggatttgaaaaaggcgataagctgattgtcatggttccgagagtgcttgaagcgtatgccgtttatttagcgatcttaaaagcggggatggtcgtcattccttgctcggaaatgctgcgcgccaaagaccttgaataccggatcaaacacgccgaagtgaaaggcgctatcgtttatccttcatttataaacgcgtttgacgaggtgaataccgaacagctggtgacattgtcaatcggtgaaaatgatgccggctggaaaaacctcctaacgattgaagcggatggagacagttttcaaacagctgatacaacaagagaagacatggcgtttttgtcctatacttcaggcacgaccggccagcctaaaggcgttgtacatacacacggctgggcctttgcccatttaaaaacatcagccggtgcatggctggatatttctgaagacgatacagtgtgggccaccgcggcgcccggctggcagaaatgggtgtggagcccgctgctcgcaattctgggaagcggcgcgacaggagtcatttatcacggcagattcagcgccaagacgtatttagagctgctggagcgccatcaagtaaatgtcttctgctgtaccccgacggaataccgcctgatggcaaaagtggaggagttggacaaatatgatctttctgcccttcacagcgcagtttctgcgggtgagccattaaaccgggaagtcattgacgtattccggaagcatttcggcattaaagtgagagacggatacggccaaacggagagcaccctgttagtcggcgtcctgaaggatatggatattaagccgggaagcatgggcaaaccgacccctggaaatcaagtggagattataaacgataaaggcgaaatatgcgaaacaggcgaaacgggcgatatcgccgtgcatctgagcacaccggccttattcaaggaatattataaagatcccgaaagaacgaaaaagcagattcgcggagattactttcttacaggagaccgcgcgaaaaaagacgaggacggctacttttggtttgagagccgcaatgatgacatcatcgtcagctccggatatacaatcgggccttttgaagtagaggacgcgctcgtgaagcatccggaagtgaaagaatgtgccgtcgtggcgagcccggatgaaatcagaggttcaatcgtaaaagcctatgtcgttttacaagacgatgaaaagcgcagtgatgaacttgtcaaagaactgcaaaaccacgtaaaaacgattacggcgccttacaaatatccgagagaaattgagtttgtcgaaagcctgccgaaaacggcgtccgcaaaaatcagacgtgtggagctgagacagcgtgaagaacggctgaaggctgataaaaaagcataatacaggataaagggtgagcggggatgaaagcgatttggcacggcggcaccatctatacaatgctggacaagaatcatgtcactgaagccatttataccgaagaaggcgtcgtcaggcagacgggcagcttccgggagctccaaggaacatacggttcgcctgatacggaggaaatcgatttacatggggctgtcatgttcccggggtttacggacagtcatatgcatttaatcggacacggggaaaaacagcttcgcctcgatttgtcgcagctgacgtcaaaagaagcgatactgcgggccgcaaaagaagcagagcgtgaattggaagatggcgaatggctgatcggcgaaggctgggatgaaaatctgtttgaacagccggattacgtcacgaagcatgaccttgacccgctctttcccgaccgccccgtcctgctgaagcgggtatgccggcacgccgcggcggttaattcggccgcattgcgcgcggcgggaattacaaacgaaacacctgatccaaacggcgggattatcgtccgggatggaaccggtccgacgggccttctgctggataaagcccaagagcttgtgacacaggctctgccgcccgtctcacttcactatgtcaaacgcgcgcttcaaacggcgattacggactgctggtcaaaaggcctgaccggcgggcattcagaagatctggcatactacggagacgcgtccgttcccgttgccgcgtacgagtcattaaccggcagcggcctttatccttttcgcgcccatctgctcgtacatcacgaagccgtcgacagctggagcgctctggataaatcgaccggaccttatttggaatacggagcgatgaaaatttttgctgacggtgcgctcggaggcagaaccgctctattgaaaaagccttaccatgatgatccgtctgtttccggcgttcaggtgcatgatgacgaaacccttgccgctcttgtttataaagcgagagagaaagggatggagatcgccgtgcacgcgattggcgaccttgcatttgaaaaggtgctggatgttatcgaaagatacccggcaaagcccggacagctagacaggctcattcatgcgcaagtattagatgacggattgattgaaagagccgcccggctgccgatcggacttgatcttcagccgcattttgtggccagtgattttccgtgggtgattgacaggctcggagaagagcggatgaaaacggctttcgcctggaaaacactgctgtcaaaagggctgctgtgcgccggaggttcagatgccccgattgagccggccgatccgcttctgggtattcaatcggctgtgctccgtacgagcaagcagcacccggaaggtccggcctattatgaaaaagagtgtctgaccgtgtacgaagccattcagctttacacggagggaagcgcggccatcatccataaagaacatagccgcggacggatcgcccccggctatgatgccgactttaccgtactcagcggtgatccgttcaggacggacccgaaaaagcttcatgaattggaagctgtcaaaaccgtcgtcggcggccgtatcgtatatgaaaaagaggacaggcagtgatgcccgtcctctttttttatgataaaaatgatcgttttactttttcccagaaagagttgtctttcagtttcaccgttttgatttttttatcggatagtctaatctcaacctttttgacattccgcgtgctgagcgcttcattatcaagcccgataatcggatgctcattgccgccttgcaccacctgcagtgtcagcttccggtctgagcttaaaataaacggagatccgagtgtacggtatgtgttgttgttcaacgacgccagttcggatacctgcatgcaggaaatcaaaggatcaacaacggcgcctgaaacagatttattgtaggcagtgctgcccgtcggggtggaaatgatcatcccgtctcctctgaacgtctcaaaatgaagatcatcaattaacacatccatcacaaacgttttaataatgcttgaacggatggaaacctcgtttaaacagtgaaaatgattgctgccgtccaccgttacgtgaatgagcgggtattttctgacctcaagctgttccgcggtcatgctggccgccattttttcaggatcatcgctgtgaaaatcacagtacaaatgggctttcccttttttagcgatgccgacatacaggcagtcatcacggaatccggtttttctgacggcttgcagaaatgagccgtcgctgccgatgctggcgataattccggcatcctccggttgagccgcaactgtaaaaccgtgcgattcagcaagctgcttcaaagagctgacttgttcttttgtttcgttgttttgtttgtgaaaaaaataaacattgcggcgaagatcggtcatatccccattcccctttgctgtcatatttacgtttttctcccagcaggtattgtgttaaaatacctgtggcaatagtgtaacatgtttcctgtttatccgttaagggaaagcgcttcatgaaaaaaatgaatctttttttacgggggaacgtacgaatattgacagaaaaggaggagaacaaatgaatgcaaaaagatggattgcgctcgtcatcgcgctcggcattttcggcgtatcagtcattgcaagtgtgaccgtcggggtgctgaagaatatcggagatacagggtctgactttgcatcactgacagatgacacagaggaagtgacgctggataagggcagccccggcagtaaaatcgccgtgcttgaagtggacggcacgattgaggataacggcgggtccgctggcctgctcagctcaggcgggtatgatcacagatcatttttaaaacaggttgagcgtgcgaaagaagataaaagcgtcaaaggaattgtgctgaaaatcaattcacctggcggaggcgtatacgaaagcgcggaaatacataaaaaactggaagaactaaagaaagaaacgaagaaaccgatttatgtatccatgggttccatggcggcatcgggaggctattatatttcaacggccgccgataaaatctatgcttcaccggaaacgctcacgggttcactgggcgtcatcatggaaagcgtcaattattccaagctcgccgatgaactcggcatcaagtttgaaaccattaaaagcggcgcgcataaagacatcatgtccccgacccgcgacatgacgaaggaagaaagaaagatcatgcagacaatggtcaacgattcttatgaaggatttgtcaatgtcatttcaaaaggccggcacatgtcaaaagcggatgtgaaaaaaattgccgacggccgtgtttacgacggcagacaagcgaaaaaaatcggcctcgttgatgagctcggtttttacgatgacacgatcagcgcgatgaaaaaggaccataaaaatatgaaaaacgcttcagtcatcacatacgaggaaggattcggattaggctcgctcttttccatgagcgcagcgaaaatgtttaaaagcgaaattgattttctgaatatgaaagaactcatttcgcaatccggttcgccgcggatgatgtatctctatgcaaagtaggggggaagaaagaatggacgcgacttacgaaggctttcacggcaaagaagaggaagccgaacaacagagggcgcccgagcaggcatatgcgggcttttggatcaggttttgggcgtttcttcttgattggctggtggtctggggacttaaccatctcatcgtttcaccgattttcacgctgatgaagctcccggcaacaagcggaatgtttacaatctcagcttattccgtcacaaccctgatcgtctacctcgcctattttgtgttcatgacgaaatggtttcatcagacactcggcaagatggtcttcgggttaaaggtcacttctttgacgcccggaaagccgctgacttggagcaccgtcattttcagagaagcggtggggcgttatatcgataaaatctggattctctatatcgtcattgcgtttacgcccaaaaagcagggcattcatgatctgatcgccgacacaacggtgattcacgaagcgctgtaccgcaaataaaagcagtaaacccggaataaacgtccgggtttattttttttggttttggcgataatgctgctaaggaagtgaagcttatgggatatgccgcagcagctgttattctcattctcattttggcctggctgctcatgaggatgaaaatccacctgactttcgaatatcttcacgataaagataacgacaaactgacgtttaaaatctcggccttatacgggctgatccgtattaaaaaaacgctgcccgtcattaaagtaaacagcgaagacgcgtcaattgatgtcaaacaggacacaaaatcagaaatgaaaggtcagaaaaaagagaagaaaaaaatcacatatgaagatgtcaaacagagcattcacagaatagaaatgattctgcaccaagtctttcagatgcgccaaatcgccgcttcatttcttgcgggagtccgtgttacgaagttcgaatgggtgacggttatcggaataaaggacgccgccgttactggaatcgccgccggcggattgtgggccgtaaagggaggacttacggcgatgctgtatgatcatctgcgtttcatacataaaccggtgtgcgaagtcattccgtcttttcaagtgcctgcatccaagacgcatttgcagtgtatattcttttttcgttttggacatcttataggtgcagctttcaaattgcttaaatacgggcggaacggactttctatcatacgaaagaaacagccggttccggttgcttcaaagaatgattcatcagtttaaggaggagcgcatatggcagaccatcccattcaaggtttaatgaaaaccgctatggaaaatttaaaagaaatgattgacgtgaatacaatcatcggcgatcctgttgaaacgcctgacggcagcgtaatcttaacggtttcaaaggtcggcttcggatttgcggcgggcggaagcgagtttggaggaaagccggctgaaaaaagaaccgatgatgatgaaagaaaagagcagaagctcccgttcggcggcggaagcggcggcggagtatccattacgccgattgcgtttctgattgtcggaacaaacggcgtgcgcatgcttcatttagacgaaaacacccatctgattgataaactgttagactccgcgcctcaaacgattgaacgcatccagcatatgtttaaaaagaatgaaaaaggccggaaccaaaaaagaacggatatcgatttataacagaaaagttaactgccgcccgcagttagctttttttacgatgcggcataacctttgcagtttgcataaaactcgactatgatagagctatacatagataaagggaggaatcagaatggctgaaattacatttaaaggcggagccgtgacgctgatcggacaagaagtgaaaccgggggaccaagctcctgacttcacggttctgacaaacggattagaagagaagacattagcagatatgaaagggaaagtaacgatcatatccgttattccttccattgacacaggcgtatgtgacgcgcagacacgccgcttcaacgaagaagccgcaaaactcggtgatgtgaacgtttatacaatcagcgccgaccttccgtttgcacaagcgcgctggtgcggagcgaacggaattgataaagttgaaacattatcggatcataaagagatgtcatttggtgaagcattcggtgtttatatcaaagaacttcgtcttttggcacgttccgtattcgtccttgatcaggacggaaaagtcgtttacgcggaatacgtaagtgaagcgacaaaccacccgaattatgaaaagcctatcgaagctgcaaaagcgttaatcaagtaaagagagaaaaagagctccgggtgctgccgcggagctcttttcatggcaaggaggaaacagcatgcaacacgaccatgtcggtcagatttatgaacttttagatgaagccgcccaagtgatagcagaaggccttcagatttcttatattgaggggcttgcggaagcgggagaaatgtattttcttgaaaaggccgaccagcttccgcttcaggaaaagcaaaccggcgagcttaacagcctgcttgcgaaagcagacttcagaaaatgggagcatgaatggatccgcaaggcgttccagctcgccattttaaaagggctgaaagataagtcccatccgaacagacagatgacgcctgatacgatcggcattttcatcagttacctcgtgaataaatttacgggcggccgaaaaggcctgacattgctggaccccgcctgcggcaccggaaatcttctgctgaccgcggcaaaccagctttcggacaaagcggcaaaaagcttcggcattgaaatcgacgatgtccttctgaagatcgcttatgctcaggcgaatctgcaggaaaaagaaatggagctgttctgccaggacagtcttcagccgttatttatcgaaccggccgatgcggtcatctgcgatttgccggtcggctactatccgaatgacgaaggcgctgaagcgtttgagctgaaagcggatgaaggtcactcttttgctcaccacttatttattgagcagagcgtcaaacatacaaaaccgggcggatacttattttttatgattccgaaccatctgtttgacagcgcgcaaagcgataaactgaagcggttttttgcggaaaaagtgtatatcaacgcccttcttcagctgccggctactatgtttaaagacgaagcgcaggcaaagagcattttaatcttgcagaaaaaaggcgaagacgcaaagccgccgaaacaagcgcttttggcgaatcttccttcttttgcgaaccagcaggcgatgcgggagatgacggcaaaattggatcaatggattcaaaaagaaaaataatggcgaaaaagcagtgtgagatgcaaaatcccgcgctgcttttgctttttaaaatgaatggaaatcaggaagataacacaaattaaggaaagaaaataacattccgtaaggccgtgccgtccatttggcacaaatgaaatttatcagaaaatatcgacttcatattgtaagcggtaccaatgtggatgttgacttgaaatgctgagttgacaatgtttaaatggaaaagtcagatattttttggactgcagttatggtctgggaaaaaagaacgaacaaacgaagaagaattttgataggagcgtcatttatgtctaaaattattgcaattaacgcaggaagctcatctttaaaatttcagttattcgaaatgccttcagaaaaggtgctaacaaaaggtttagtagaacggatcggtatcgccgacagcgttttcacaatctctgttaacggcgaaaaaaatacagaagtgacagatattccggatcatgcggttgcggtgaagatgctgcttcacaagctgactgaattcggtattataaaggatttaaatgaaattgacggaatcggccaccgtgtggttcacggcggagaaaaattcagcgattctgttttgcttacggatgaaacaatccgtgagattgaagagatttcagaactagcgccgcttcacaacccggctaacatcgtcggcattaaagcctttaaagaagtgcttccgaatgtgcctgcggttgcagtgtttgatacggcgttccaccaaacgatgcctgaacaatcttacctgtacagcctaccgtacgaatactacgagaaatacggcattcgcaaatacggtttccacggcacatctcataaatacgtgacacagcgcgcagctgagcttctcggccgcccgcttgaagatttgcgtctgatttcctgccacctcggtaacggcgcaagtatcgcggcggtagaaggcggaaaatccattgatacgtcaatgggcttcacaccgcttgcgggtgttgcgatgggaacacgttcaggaaacatcgaccctgcattgattccgtacattatggaaaaaacggatcagacggcagatgaagtattaaatacgttaaataaaaagagcggactgcttggcgtatccggtttctccagcgaccttcgcgatatcgtggaagcttcaaaagaaggaaacgaaagagcggaaacggctcttgaagtgtttgcaagcagaatccataaatacatcggttcttacgctgcgagaatgagcggcgttgacgcgattattttcactgcgggtatcggtgaaaacagcgttgaagtcagagaacgcgtgcttcgcggcttagaattcatgggtgtatattgggatcctgcgctgaacaacgtgcgcggcgaggaagcgtttatcagctaccctcactctcctgtcaaagtcatgatcattccgactgacgaagaggtcatgatcgcacgcgacgttgtccgccttgcacagtaatgatcaaaaaaagcacatccttttagggtgtgcttttttattgaatgccccaggatcaaacgttacgatatgtttaatacataaacgatgaggtgaagcaatgagtgtgcatgaacataaacaagaagccccgtcagccgtgcgctgcaaggtgatcacagtcagcgacacgagaacgaaagaaaccgacaaaagcgggcgcgtcatgatggacttcctcagggaagcgggatttgaaacggtcgcttatgacattgttaaagatgaaaaagatgaattgcagaaagccgttttatccggctgtatggatgaatatacagatgcggtgctgttaaacggagggacgggcattgccgaaagggatgtcacaattgaagcggtcacgccgctgttttcaaaagaacttccgggattcggcgagctgttccgcatgctgagctatacggaggacatcggttccgccgccattttgtccagagcggcagcgggtgtgatccaaaataccgcagtcttctgcacgcccggctcctcaggcgccgtaaagcttgcaatgagtaaactgattattcctgaactgccccatgtgcttcgggaaatccgaaaagatttataaatgtataaaaaggctctgctccgctcaaaaaattgggtggggttttttttataaaaggcttgaaaaaacagaatttacttgttacagtgtatacatacaaaatgcatttttattaattaaaactaatttttatacaaaagggagcttttaacatggcagaacaaaaaaaggttgtattggcatactcaggaggtcttgatacttctgtagcgataaaatggctgcaagaacagggatacgatgttgttgcctgctgcttagacgtaggggaaggaaaggatttggcattcgttcagcaaaaagcgctggaagtaggcgccgtaaattcctatgtgattgatgcgaaagaagaattcgcccgggagtacgcgctcatttctatgcaggcccatacaatgtatgaaggcaagtatccgctcgtatctgcactatcccgtccgttaatcgcgaaaaaactcgttgaagtcgcggaaaaggaaaacgcggtggccgtagcgcacggctgcacgggaaaaggcaacgatcaggtgcgtttcgaagtatccattaaatcattaaatcctgatctggaggtcattgctccggtccgtgagtggcaatggtcgcgtgaagaagaaattgaatatgctgcaagccgtggcataccgattccgatcaatcttgacagcccgtattccatcgaccagaacctatggggacgcgccaatgaatgcggtatattagaagatccgtgggcggcgccgcctgaaggggcatatgacctgacagcatctcttgaaaacacgccggacgttccggaaatcatcgaaatcgcatttgaagccggtgttccgatttcaatcgacggcgtaacctatccgctcgctgatttaattctcaagctgaacgagactgccggaaaacacggcatcggccggattgaccatgtggaaaaccgcctggtcggcattaagtcccgtgaagtttatgagtgcccgggcgccatgactttgattacggctcacaaagagcttgaggatctgactttagtgaaagaagtggcccatttcaaaccggcaattgaacaaaaactgtctgaaatcatctataacggtttatggttctcgccgttaaaagacgcgctgcttgcattcctgaaagaaactcaaaaacacgtcaccggcgtcgtacgcgtcaagctgtttaaaggccatgccattgtagaaggacgtaagtcggaatattcactctatgatgaaaaacttgcgacatatacaaaagacgatgcttttgaccatcacgcggcaatcggtttcattgagctttgggggctgccgacaaaagtaaacagcattgtgaaaaagaaggagcagattgaagcatgaagaagctttggggaggccgttttcaaaaaacaccggaaaagtgggtcgatgagttcggcgcatccatcacgttcgaccaaaacttagtcaaagaggatattacagggtctctcgctcatgcggcaatgctgaaaaaatgcggcattctgacggaagaagaagaaggcgccatccgacaggggctgcagaccctcctgcaaaaagcagaggaaggaacgcttgaattctctgttgattatgaagatatccatttgaatattgaaaaaatgctgatcgaagaaatcggaccgctaggcggcaagctccataccggcagaagccggaatgaccaggtggcgaccgacatgcatttgtatttgaaagatcatgtctcacatatcatcgtgctgattgaacagttccaaaaagcgctgatcgaaaaagcggaggcgaatgtcgagaccattctgccggggtacacccatttgcagcgggctcagccgatttctttcgcccaccatctgcttgcttatttttggatgcttgaacgggataaagagcgttttcgcgacgctatgaagcggattaacatatcgccgctcggatgcggggcgcttgccggaaccacgtttccgatagaccgtaactattcggcggagctgctcggttttgactccatttatgagaacagtcttgacggagtcagtgacagagattttattctcgagtttttaagcggcagcagcatgctgatgatgcacctttcgcgtttatcagaagaaatcattctatggtgctcgcaggaattcaggttcattgaactggatgatacgtatgcgacgggaagcagcatgatgccgcagaagaaaaaccccgacatggctgagctgatccgcggtaaaaccggacgcgtatacggtgatatgatggggcttttcacgattatgaaagggctcccgctcgcttacaacaaagacctgcaggaagataaagaaggcatgtttgacacggtgaaaaccgttgaaggaagccttcagattttcacgggcatgattgaaacgatgaaagtaaacaaagacatcatgaaacaagcgacaaaacaagatttttcaaacgcgacggaacttgccgattatttagctaaaaaaggcatgccgttcagagaagcgcatgaagtggtcggcatgcttgtgtacagctgcattgaaaaaggaatctatttaagtgatatggcatttgaagaattccttcaagccagcagtctctttgaagaagatatctataccgtgctcgatccgcatcatgcagttgaaaaaagaatgagcgccggcggaacgggttttcagcaggtagaacaggcgctcgtaaaagcaaaagcctgcgccggcatttaatttgctgaaatttccttcatattttcccgtcatatcagacaccctacatctataaagatgggaggtagaaggaatgcgcaaagaacaagaccgttacatctatgatgaaaaagaaagtgaagaaacggccaggctcatctcagaggcatacgaaagcggttatgtcggcatggaggaagcctctgctccttcagaaaattaagctgtctgtaaagacggcttttttttcgtgcggacgaagtgcaaaaaagtgatattgccgtttgtttatagtaaagtagagggagaaacgtcttgattttattgaagcggcaacgttgcctggggagggtattcaatgtgcgacatgctctaatcactgccggtacaaagggattgggccgaaaagtaactgaaatgcttctggaaaaaggcttttctgtcacagtgaattacagacaagacgaagaagcggtcgcctgtctgaaggcggattatcccgggtgccatgacagattgcaattcgttaagggcgatgtaacccggaaagaagatcttatgcggatcgccgatgcagcccttcagcggtttggaaggattgacatactgattaacaatgccgggccgtacatatttgagcgcaaaaagcttgccgattactccgatgacgaatggtatgacatgcttgaagggaatttaagcgccgttttccatctgtttaaagcggttatcccggtcatgagacagcagcggttcggccggattattacatacggttttcaaggagcggaccatgcccccggctggcttcaccgttccgctttcggagcggctaaagtcggattggcttcgttaacgaaaaccattgcgattgaagaagctgaatcaggcattacggccaatatggtctgcccgggtgatattgtaggagatatgaaagaagcgtctatagaggaagcaagacggaaaatcggcaaagaaaagacgccgatcggcaggtccggaaccggagaggacattgcgagaatcatcgcctttttatgtgaagatgattccgatcttgtaaccggaacggtcattgaagcaacaggcgggctgaatgtgattaacaggcatcaatccctgtaagttttttcgtttgtcaaaaagggaacttgataaatattaattttttatgaggtgaaaacgatgaaagtgacttatcacggacattctgtcattcaagtggaaacgaaaacccataacattatttttgatccgtttctgaccggaaacagtctgacaaatttgaaaccggaagaagtgaaagcggatgtcatcctgcttactcacggacacaatgaccatgtcggagatacagagcagatcgctaaacaaaacgatgcgctcgttattgcgccgaatgagctggccgtttatctcggctttaaaggtttaaaggtccacccgatgcatatcggaggggcgcgccaatttgatttcggcaaagtgaaactgacacaggcattccacggatcggcggtcactgatgaagaaaacaaaaccattacgtacacggggatgccggctgggattttattgacgattgacggcaaaacgattttccacgccggggacacggcgctgttctctgatatgaaactgatcggggaactgaatcacattgacctggcgtttctaccgatcggtgataacttcaccatgggccctgaagatgcgaaactcgcggctgaatggctgagagcgaaacaggtcgttcccgttcattacaatacatttcctgtcattgaacaggaccctgacgctttcgccgaaagtctgcccggaggcgtcggcaaagtcatggcggtcggcgagaccattgagcttgcctgacatatgtgtcaaagaccttctgaatcaagcattcagaaggtctttttgtgatgccgccttttttcgggcgtctcattgcgaatgaatcccccgtacccttataataaaagcagaagactgtccttagaggtgaaacgcttggcaacaaagcatgaacaaatcctatcatacatagattcgcttcctgtcggtgaaaaaatttcggtcagaagaattgcgaaagaaatgaaagtcagtgaaggaacggcttacagagccattaaggaagccgagaacaaaggattcgtttccactattgaacgtgtggggaccatccggattgaacagaagaaaaaagaaaatattgaaaagctgacatacgccgaggtcgtcaatgtgatagacggccaggtgctcggcggaaaagccggtctgcataaaacgttgaataagtttgtgatcggcgcgatggagcttgacgcgatgatgcgttatacggcggcggggaacctgttaatcgtcgggaaccgaatcaacgcccaccgccaggcgcttgaagcgggcgcggctgttttggtaacgggagggtttaataccgacgacagcattatcgagctggccgatatgcttgagcttccgattctctccacgagttacgatacctttacggtagccgcgatgatcaaccgggcgatctatgatcagctcataaaaaaagagattgtgctcgtggaagacattttgacgcccgcagatcggacagtgacgctgtcccctaaggataagctggagaaatggtacgaaaagaactatgaaaccggacacggccgcttcccggttatcgaccagcagatgaaaatccacggaatcctcacatcgaaagatatcgcggggcatgaccggtcagttccgattgaaaaagtaatgaccaaaaaccctgtcacggtgatcgggaaaacatctgtcgcctcagctgctcaaatgatggtttgggaaggaattgaagtgcttccggtgacagacgggcatcacaaactgatcggaatgatcagccgccaggatgtcttaaaagcgcttcaaatggttcaaaagcagcctcaggtcggggaaaagctggatgatattgtttcaaggggatttaaagaagacgaagatgacaaaacgccggccgtttatcaatatgaagtcacgccgcaaatgaccaatcagctcggcacgatttcttacggggtgtttacgacgattttaacccaggccgccagccgatttttacgctcccgcaaacgcggcgagctggtcattgaaagcattacgattttcttcctgaagcccgtacagatggagtcggtcattgaagtgaaaccgcgcattttagaggcgggccggaaattcgggaaaatggaagtggaagtgtcaagccaaagcggcatcgtttcaaaagcgatgctcatggtgcagctgatggagagaagttaagggacgcacccgggtcccttggcattcattatgcgtggtccctctccgcttcctttgcatggatgggctcataatgcttataggctttatacccggcccatgcgctgcctgctccgattaaaatgaagacgccgccgatgaccagggtcaggacggagtgaaacagaatcatttggtttactccgtacaaaagcaccagcgcgcctaatgccatacttgatttagccgaaaaacattccttctccagcgcccgtttcgtctggattccttttactttgtaatacacgtaaaagcaggcagaaagcccgatgagaaaaacaaaaaccagcataaatgaaatcctccattatatgagtttgcaaaaccgtttataccgttgctgaaagattttccttttccatggataaagagtatgattaaatgaataaaaacgaaaaggagaaagcgatgaaatccgaactgatcagaaccatatcattatatgacaccattatcttacatagacatgtgaggcctgacccggacgcctacggttcacagtgcggccttacggaaatcctgcgggaaacgtatcccgaaaaaaatatttttgccgtcggacagcctgagccgtccttgtcttttttatattccctcgatgaggtggatgacgaaacctataaagatgctcttgtcatcgtgtgcgacaccgcaaaccaaggcagggtcgacgatcagcgctaccattccggcgcaaagctcatgaaaatagaccaccatccaaatgaagatccgtatggcgatctgttatgggtcgatacgaatgcaagctccgtaagcgaaatgatctatgagctgtacctggaaggaaagcagcacggctggaaactgaatacgaaagcagctgagctgatctacgcgggtatcgtcggtgatacggggcgcttcttattcccgaacaccacaaaaaagacattaaaatacgcgggagagctcattgagttcccattttcatcgtcagagctgttcaatcaattgtatgaaacaaaattaaatgtggtgaagcttaacggctttatttatcaaaatgtgtcactgtctgaaaacggcgtcgcttccgtgttcattaaaaaagacattttggagacatatggaaccaccgcttctgaagcgtcgcagcttgtcggaacactcggaaatatttcgggtatccgcgcttgggtgtttttcgtagaagaagacgatcaaatcagagtccggttccgttcaaaaggtccggtcatcaacggaattgcccggaaatacaatggcggcggacatccgcttgcggccggcgcatccatcttcagctgggatgaaaccgatcagattcttgctgatctggaagaggtatgtaacgaacacaagtagaggggagaccctctttcttagtgttcatctgtcacggggatgaaccagcagccgaaatcagtcaggtcttcgtagacgcggagattacagatttggagttctttttttatgagggaagcgagtgtgtctgtttctgcatatgcggaatagccttgtctgattcgggctgcatgatcttttgccaagcgtcgttcactaaaaacctccattttcccttcctcccttcagaatcattgaaaatgtctcatttacagtttataaaaaagcggagaaaaaagcgacagatctatggaaaatttttaaaaatgacataattacgtcgcaaaagaaatatgaatttcgacagacaatctcgtataaatcgtcagttcctttacttcagctttaaattccttctcatttatggtgtatattttgttttcgatcgtccgttttaaaagctcctttgttttatacacgctttcaatatcttttgtgatgacttcagaaatattatctttcacttgttcctcaaatttcatcttgtcaggctgggcgattctgtatttttccccattgatcagcttcacatcaacactttggatgagaagtctttgcttattatcctcatttaatttatgaagatccttctgatagatggagatttggttttttaaatcccgcgcgtgctcacgctgcttttcaattaacgtcacttgttcttcctgaaacgttccgtatgtaaacagaaagaacagccagctgacgatggctccgcacatcattcccgcgaaaaaacgctgccatcccggttttttataatactcgggaattctcatgatgacatattctcctgggtcagccatgaaatgatcagccagccggtctgcgcgccgcccattgctgaaataattaaaagaagctgtttgaagatgtcgcgcgtgttgccttcgaacagcccccgctcgaaactgtataccgcgtcaaatgttcccccgatggccgcgacaagcgcccagatcttcagcctgttcgccaattttgtgatcgccgtcagcggaggctcgcctgataaataagctccgaggccgccgatcagcgcgccgccgagcaacacaccgagggcgataaaataactgctgatgaaattcgccataaatccggcttcctgatccatatatacaccacctcacttttctatcatattgagcgaaacggacaagtatgatgatgagtcaaaaaagaacatttgtttcttaagaaaacccgtcttataatgtagaaaggcaaaatgaacgtatgggaaaggagtggcggcattgtcttttgttcacctgcaagtacatagcggctacagtctgttaaacagcgccgcttctgtaaaagagcttgttacacaagcgaaggaactcggatattcatcattggcgctgacggacgaaaatgtgatgtacggcgccattgagttttataaagcatgcaaatcaaacggaatgaagccgattatcggtctgacggcttctatatacacggacgatacggagcttgaagcacatccgctcattcttttagcagagacaaacatcggatatcagaacctggtgaaaatctcaagtgcgctgcaatccatggcaaagggcggcatgaagcgaaaatggatgaagagctatcatgaggggctgatcgccattacgcccggtgaaaatggctacattgaaagcctgcttcaagccgggaagtttgaagaagcggtccgggctgccgaaggattccgggagctgttcggagacggccgtttttatttagggtatcagccgtttaaaggacatgagacgttatcagaagagattctccgtctgtcagccgagacggaaatcgctgtctgcgctgcgggggatgtccgttatatcaagaaagaagatcaagatgcgtaccgctgtctgtgcgctattaaagccggagagaagtgggaggatcagagcgggaatctgccggacttatacttgagggcgcctgaagaaatggcagagctttacacgcggcatccggaagcgattgaagcagccgcgcgtatcgcccggcaatgccgggtcgatgtcagcctcggacagacacagcttccgtcttttccggcgccggacggcaaatcagccgatgactatttggcggagatctgtcatgaggggctgcgcctccgtttcggcactcctgatgagcgcgctgtccgccggcttgaatatgagctggacgtcatcaggcgcatgaaattcagtgattattttctcatcgtatgggactttatgaagtacgcgcatgaaaagggcattgtgacaggcccgggaagggggtccgcggcaggctcgcttgtcgcttactcccttttcattaccgacgtggatccgcttaaacattctctgctgtttgagagatttcttaatcacgagcggatcagcatgccggatattgatatcgatttccctgacacgagaagggatgaggtcattcagtatgtacaaaataagtacggggccatgcacgtcgcccagattatcaccttcgggacattggccgcaaaggcggcgttaagggataccgggagagtgttcggaatcagcccgaaagaagccgaccagcttgcccgcctgattccgtcaaaaccgggaatgacgcttgatgaagcgaggcggcagtccgctcagctgaacaggaggctgtccgaatccgccgttcttcataaagtgtttcagatcgcaaggaaaattgaaggtcttccgcggcacacgtcaacacacgcggcgggggtcgttctcagtaaagagccgctttctgaagttgtccctcttcaagaagggcatgacggcgtgtatttaacgcagtatgcgatggatcacttggaagatctcggtcttttaaaaatggactttttaggtttgcgcaacttgacgcttattgaatccattaaaacgatgattgaaaaagagacgaatacgaaaattgatttttccgagatttcttatcaggatgaaaaaacgttctcgctattgtcaaacggtgatacgacgggtattttccagctggaatcatcaggaatgagaaacgtgctgaagcgcctgaagccgtcaagactggaagacattgtcgcggttaacgcgctttacaggccgggaccgatggaaaatattccgttatttatcgaccggaagcacgggcgggcgcgtgtggaagtgccgcacgaggacgtacgaaatattctcagtgacacttacggcgtcatcgtctatcaagagcagataatgatgatcgcctcgcgcatggcagggttttcattaggtgaagcggatctgctcagacgggctgtcagcaaaaagcaaaaggacattctggacagagagcgaagccattttgttgaagggtgcttaaaaaaggagtattctgtagtcactgcaaacgaggtctacgatctgattgtaaaattcgctaactacggattcaacagaagccatgctgtcgcatacagcatgatcggctatcagctcgcctatttaaaagcgcattatccgttatattttatgtgcgggctgttgacgagcgtcatcggcaatgaggacaaaatatcgcaatatctgcatgaagcgaaggggagcgggattcaagtccttccgccgtcaataaacaaaagcggttttccgtttgcgccggaaaacggagccgtcagatacagtttgcgggccgttaaaaacgtaggcgtctcggcagtgaaagatatttataaagcaagaacacataaaccgttcgaggatcttttcgatttctgctttcgcgtacctgcaaaaagcgtgaatcggaaaaccatcgaagcccttatattttctggcgccatggacgaattcaatcaaaatcgcgccgccttgctggcctccgttgatgtggctttagagcacgctgaactttttcgtgcagacgatgaccaaatgggattgtttttggaagaatcgttctccattaagccaaaatatgtagaggctgaggaatttccgctcgtggacaagcttcggttcgaaaaagaagctctcggtgtttatttctcgagccatcctttatctgctttcagggatctcctgaaaaaacggggggcgcaagcgatcacagcagcgcggcagatgccgaaggggcagctgtcaatcggcgctttgctcgcgggcatcaaaacgattcggacaaagacaggtcagcatatggcgtttctcacattaagcgatgaaacgggagaaatggaagccgtcgtgtttcctgaccaatatagaaggctgtctccgctgttaaaggaaggcgcgctattattcgccgccggaaaaatggaagagcgtcaggagaagacacaattcatcatgtcatccgcctctcttcttgagcagacggaggcagacagagcgccgtctgtttacatcaaaatcgaaggcagccggcacaatcaggagtttttggaaaagatgaagcgtattttactggagcataaaggggaaaccggcgtttatctatattatgaaaaagacaagcagacgatcaggctgccggatacttttcatattcaggcggaccatcaggcgttataccgtttaaaagagctgctgggccgcgaaaacgtcgtgttaaaatagtggtaacaataatcgttttgttatacaattgaaacaattgtgctatcttatttaaagattctgaaatttttcacctccagcgattgtaccagtctatgcggcagaatatgtaacaaagtacttaaaaggagtgtttagaatgtcattaagagaagaagcgttacatttacacaaagtaaatcaaggaaagctggaatcaaaagcaaaggtagaagtcagaaacgcagacgacttaagccttgcatactctcccggagtagctgagccttgtaaagagatttatgacgataaaaacaaagtatatgattatacaatgaaggggaacatggtagcagtcgtaacagacggatcagccgttctcggactcggtaatatcgggcctgaagcttcacttccggtcatggaagggaaagcggtgctgttcaaaagtttcgcgggcgtggatgcattcccgatcgcgcttgacacaaacgatgtggacaaaatcattgacactgtgaagctgcttgcaccgacattcggcggagtcaaccttgaagatattgcggcgccgaactgcttcattatcgaagagcgcctgaaaaaagaaacaaacattccggttttccacgatgatcagcacggcactgccatcgtaaccgttgccggacttgtaaacgcgctgaaattatcaggaaaatccatgtcatccattaaagttgtggcaaacggagcgggagcggcaggcatcgcgatcatcaagcttctttaccatttcggcgtacgcaacatcgtaatgtgcgactctaaaggggcgatttacgaagggcgtccggccggcatgaacgcagtgaaaaacgaagtggcgaagtttacaaaccaagaccgcaacgacggttcgctgcaggatgtcattaaagatgcagacgtctttatcggcgtatcagtcgaaggcgcgctgacgaaagaaatggtggaaagcatggcgaaagatccgattatcttcgcaatggccaacccgaatccggaaatcatgcctgaagacgcgcgcgcagccggcgcaagcgtaatcggaacaggccgttctgatttcccgaaccaggtcaacaatgttctggcattccctggaattttccgcggggcgcttgacgttcgcgcgactcacatcaacgaagaaatgaaaattgctgcggttgaagcgattgcttcccttgtttcagaggaagaattaagcgctgattatgtcatcccggctccatttgacaaacgtgtggctcctgccgttgcgaaagctgttgcgaaagcagcgatggaaacgggcgtcgccagaattacggtcgatcctgaggaagtggctgaaaaaacaagacagctcacggttatcggcgaataataacacaaaaatgaaatggcagcgcgttggaaaaaaacaacgcgctgctgttcaatatacggactgctggcatttttttaagggcaggtcttaaaaaaatttcagcagaatccttatttcttttgaaaacgctgacagataaggctgaacaacgctttttacggtatgaaatccgtccgtttccgtctgttttgcagcaaaaaatgtcgaatggaggatgacaccgtttgacaaaaaaagtacaatagtttcggtaaagttattattaagtctatctaatcggaagacatgcagtgaagagaacccttcacaaaagggaggtaatcatttgttaaaggatatattcacaaaaaagaaaaaatatgcttccgtgccgtctgagcaggcaaaacatgatgttccggaaggcattatgacaaagtgccccaaatgtaaaaaaatcatgctcacaaaagagttagataaaaacctgcgcgtctgcatgaactgcgggcaccatttcccgatgaatgcaaagcagcgcattgaaagcctcctggatgaagattcattcgaagaattcaaccagggaatgatatctgaaaacccgctcggtttcccggaatacttagaaaaaatcgaaaaagaccgtgagaaaacatcgctgaatgaagcggtggttaccggaaaaggaaccatcagcggattcccggccgtgatcgcgatcatggattcaacattccgaatgggcagcatgggttcggttgtcggcgaaaaaatcacgcttgcaattgaaaaagcaaaagaggaaaaagtcccgtttatcatctttaccgcttcaggcggcgcacgtatgcaggagggggtcttaagccttatgcaaatggccaagacaagctctgcattaaaactgttcagtgaggagcagggactgattatttctgtcatgacccatccgacgacaggcggcgtatcggccagtttcgcgtctctcggtgattataatttcgctgaaccgggcgccttgatcggatttgccggaagacgtattattgaacagacgatcggggaaaaactgccggaagatttccagacggcggaatttttattaaagcacggccagcttgatgcggtgattcaccgaaacgacatgaaagacaaactcgcatttctgctggacatgcaccaaacaggaggtgagcatgagtggctgcaagattagaatttgaaaaaccagtgattgaactgcagacgaaaatcgccgaactgaaaaaattcacccaagattcggagatggatttaagcgctgaaatcgcaaggcttgaagaccggctcagcaagcttcaggatgagatttataaaaacctgaagccgtgggacagagtgcagatcgcacgccttcccgaccggccgacgacgcttgattacattcaatacctgtttaccgacttttttgagtgccacggagacagaacatacggagatgatgcggcgattgtcggcggagtcgccaaatatcacggcatgccggtcaccgttatcggacatcagcgcggaaaagacacgaaagaaaaccttgtccgcaatttcgggatgcctcaccctgagggctaccgcaaagcgcttcgtctcatgaagcaggcggataagttcaaccgcccgattatctgcttcatcgacacgaagggagcgtacccgggtaaagcggcggaggaacggggacaaagtgaagccatcgccaagaacctgttcgagatggccggcctgaaagtgcctgtcgtttgtatcgtcatcggggaaggcggcagcggaggcgcgcttgcgttaggtgtgggcaaccgcatgctgatgcttgagaactcgacgtattccgttatttctcctgaaggagccgcatccattttgtggaaagactccagccttgcgaaaaaagcggccgaaaccatgaagattactgcgcccgatttattagaattaggaattattgatgatatgattaaagaagtgaagggcggagctcaccatgatatcaagcagcaggcgggctacattgacggtatacttaaagaaacgttaaaatctcttcttcaattgaacgccgaagaattgatctcacagcgatatgaaaaatataaagcaatcgggaaagtttcggttgaggatcaatatatcggggtaaactgaatagacgtgaagcctatggctcacgtttattttttgtgatttttgtgatattccttaaattttatttaaaaacaatttatttaattgtataataggtaaggtttcatgggagctcaggcgtcccttttcattgttttagggcaatgatcatgatatgtttaacatatatatgttgctgaggtgaataggaaatgaagcgtataggagttttaacgagcggcggggattccccgggtatgaacgctgcggtgcgcgcggttgtgcggaaagctatctaccacgacgtcgaagtgtacggaatttataacggttattcaggattaatcagcggtaaaatagagaaactggagcttggttcggtcggtgacatcatccaccgcggcggaacaaagctgtacacggccagatgtcctgaattcaaaacagttgaaggccgtgaaaaaggaatcgaaaatttaaagaaactcggcattgaaggtcttgtcgtcatcggcggagacggttcatacatgggtgcgaaaaaattaacggaacacgggtttccgtgtgtgggtgtaccgggtacgatagataatgacatcccgggaactgattttacgatcggatttgatacggcgctaaacaccgtaattgatgcgattgataaaatccgtgacaccgctacgtctcatgagcgtacatacgttattgaagtgatggggcgccatgcgggcgacattgctttatgggcaggtcttgcaggcggagcggaatcaattttaattcctgaagcggactacgatatgcaggaaattatcggccgtttgaagagagggcacgaccgcggcaaaaaacacagtatcatcatcgttgcagaaggggtaggcagcggggttgaattcggaaaacgcatcgaagaagaaacgaaccttgaaacacgggtatccgttttagggcacatccagcgcggcggatctccaagcgcttctgaccgggttcttgcaagccgcctcggcgcttacgcggttgagcttctgcttaaaggaaaaggcggacgctgcgtaggtatacaaaacaacaagcttgtagaccatgatattatagaaattttagaatcaaaacatactgttgaaccaaacatgtatcagctttcaaaagaactgtctatttaaggcggaagaagctgaagatttcagaaggaagtgaacgagttgaaaaaaacaaaaatcgtttgtacaatcggtccggccagtgaaagtgtagaaatgctgacaaaattgatggaagcgggtatgaacgttgctcgtctgaatttttcacacggtgatttcgaagagcacggcgcaagaatcaaaaacatcagagaagcaagcaaaaagctcggcaaaaacgtggggattctcctcgatacgaaaggtccggaaatccgcacgcacgatatggaaaacggcgcgcttgagcttcaggcgggaaatgaaattatcgtttctacgaaacaggtgctgggaacgcttgaaaaattctcagtttcttatgaaggcctggcagacgacgtgtcagcagggtctatcatcctgttggatgacggtttaatcggattggaagtgctagaatcaaatccggaaaaacacgaaatcaaaacaaaaatcttaaacagcggcacgctgaaaaataaaaaaggcgtaaacgttcccggcgtcagcgtcaaccttcccggaattactgaaaaagacgccaaagacatcgtattcggtatcgagcaaggcgttgatttcatcgctgcgtcatttgtacgccgttctacggatgtccttgaaatccgcgaactgcttgaagagcataacgcgtctgacattcaaatcattcctaagatcgagaaccaggaaggcgtggacaacctggacgcgatcctggaagtatctgacggcttaatggtagcgcgcggagacctcggcgtagagattccggccgaagaagtgccgctcgtgcaaaaagaaatgatcaaaaaatgcaacgcgctcggcaaaccggttattactgcgacacaaatgcttgacagcatgcagcgcaaccctcgtccgacacgcgctgaagcaagtgacgttgccaacgccattttcgacggcacagacgctatcatgctttccggtgagacggctgcgggacaatatcctgtcgaggcggttcaaacaatgtttaacatcgccacacgcacggaagaatctctgaactacaaagaaattctgtctaaacgcagagatcaggtcggcatgacgattaccgatgcgatcggccaatcagttgcgcacacggcgatcaatctgagtgcggcagctatcgttacccctacagaaagcggccatacggcgcgtatgatcgcgaaataccgtccgcaggctccgattgtagccgttacggttaatgagtctgtatcacgcaaactcggtcttgtattcggtgtattcccggcaagcggccaaaacgcgaattcaaccgatgaaatgcttgaagacgcggttcaaaaatcacttgacagcggcatcgtgaaacgcggtgatctgattgtcattacagcaggttctgtcggtgaatcaggcacgacgaatctgatgaaagtccacactgtcggcagcgttatcgcgaaagggcaaggcatcggacgcaaatctgcattcggtccggtcgttgttgcaaaaaatgcgaaagaagctgaacaaaaaatgacagacggcgcagtattggttgcttcaagcactgaccgcgacatgatcgcttcacttgaaaaagcatcagcgctcatcactgaagaaggcggtctgacaagccatgcagccgttgtcggtttaagcttgggcattccggttatcgtcggtctggagaacgcaacttcagttttaacagaaggacaggttatcacagttgacgctgcccgcggcgctgtgtatgaaggccgcgcaagcgttctttaaacagctttaaaaaagagaggggggttctcccttctcttttgtctttaggtttattttcctattcccatgcgggcggtgacgcgcttttagaagggcaggagggcagaaaaatgagagtgttattcttactgtttatcgtgtgtccggcaattgaaatcggtttgtttctgctggcgggaaaatggctcggtatttttccgaccttccttctcatcattttgacaggcgtgttaggcgccttggtggcaaaaagacagggaaccgatgtgtatcatcgggtgatgcgcgacctgcagcacggcaaaatgccgggggaagcgcttcttgacggaatatgcgtctttttcggaggcctgcttttgatgcttccgggttttctttccgatattgcaggggcctgtcttctgattccgttcactcggaaccgcatgaagccgcttttgttcaaatggctgagaggaatgtcaaaaaacaagcggatcattatcaaataaaaacggcagccttcttacagggctgctgtttttatttggactgaacagtaatataggcccatatttcttttaaagcgcccgttgtgataaaggcctgaatgaaaacgagcagcgcgggccccgcagccagtcctaaaattccgaacaatttaaagccggcaaacagagcgattaaggtcgcaagcggatcaagtccgattgacttgcttaaaattttcggctccgtcagctggcgctggataagaaccacaatatataaaacaccgagaccgatcgcttgaggaagctgaccggcaatggccaaatacataatccagggaacaaagaccgatccggcgccgagatacgggagcaggtccaccaggccgataaaaaaggcgatggttgccgcatgctcaatccctaaaagaaaaagtccgataaagacaatgatcatcgtgaaaagtatgagcacggcctgcgccttaatgaaacctgccatcgcttttttcagctctcccgatacggccttggcgtttgccgaaacccgttccggaagaatggaataaagcagcgccttcagcttatgccagtcctttgtcataaaaaaagtcgccagcattgcgaaaatgaagacggcagctgtattgggaaggaaggcaatccatttcggcaccagctccaaaagatgtgaaagcatcagccccgcatttttagcggctgtatcaccgagggtctgaatatgcgtcacgatggatgcctgctgattggtttcaagcccgttaaataagacggtcagctcgtggtacaatggctgaatgcgggaagtgaacagctcttcgcaatacgtcataaaggcgctgatatggggagggagcgttttggccagataggcggttcccgaaatgatttccgcaacgagaaatgtcgccgcgccgagaagaataagcaaaaagaagaccaggacaatgactgtattgactgaccggggcagccccgtcagtttgtccagccagtcaacaacgggaatgatcgctgatgacagaataagggcgatcagaaacggataagttaacggaaatgaggcgtaaccggccgctaaagcgccgccggccgcagcgagtacaaacagcgcgcggaaaaaaacagttgcatagtgcggattcacatcgatcctcctctcgatggcacgtcctattacattagtttattcgtcaaaaaaaaggatatgaatacagatatgatgaaagagggtgctttcaggatgtttacacaagcgaatttatttttactattattgctggccatcgcattgatagccaaaaatcagtcattgctttttgccgtcggctttctcattgtgataaaagctgtcggtcttgatcagaaactatttccggttattcagtcaaaaggcatcaactggggggtcaccgtcattacaatcgccgttttagtgccgattgccacaggtgatatcggttttaaacagctcggagaagcgatgaaatcatattatgcgtggatcgctctcggtgccgggatcgcggttgccttaatcgccaaaaacggtctcaccttattggaaaacgaccctcatattacaacggcgctggtcatcggcacgatacttgccgtcgcgcttttcggaggcgtcgccgtaggcccgttaatcggcgccggaatcgcctacttggccatgcaaatcgttaaaatattcacttcgtaaagtaaaaaagcggcgtaaagctgctttttttgtggagaaaattagagtttgcacttgcgcattttgtagttcagacaaatgccatttacattattccgatgaatgaagcggcttaccatgtaacaaagagcttcgggattgacggcgcacatggagcgaaaacagcgattgcagtagattaaaagctgatgggatttatgggcctgataccaaagcaaaacttgaagtgttgttaaaataagcggagaccctttccttcaatttgaaagtttgttaaatttataatgagaatgaaaaaacacaattcggttggtagtccggatgcatgatttaaaatgtcagtaaccttcccctcctcgggatgtccatcattcttcagtaaatttaggaggagggaatcgttatgaaattaacggtttactacgatggtcagttttgggtaggagtcattgaagttgtgaatgacgggaaattaagagcaattcgtcatttgtttggacaagagccaaaggattcagaaataatgcattttgttaataatcaacttttacagactctctcccacactgaacaagaaggggtttgtgttaaagcaaaatctaagaaattaaacccaaaaagattgcaacgacaagcttctaaagaaatgaaaaatatcgggatatcaactaaggcacaaaaagcgataaaacaggagcttgaagcaagaaaagaaaagaaaaaacaactgaacagaaaacaaagagaaaaaataaaggaacaaaaatatttaatcagaaaacaaaaagcaaaagaaaagcataggggaaaatagttggagagcccgatgaagcccttcgattgaaaagttgagcggcatcagttagtttcttcggactgatttagagaaaaagaagtataagtcagagctcttctcgagatgaggagggtttttctgccatttatttaacttcacttacatcagtaaatgagtcagtttcaattgatgaacggtttgataaggatatttacgggctgactgcaaaagcgaaaatcttgtcttagctgaagtaataataaactctctatttttatgaagggagatgattaatttgaaaaaataattgtattgttgatcttatgtttttcgttaagctctatcacagtggctgctgctaaacaagaacatcgccagaacccaaaagattctcaagagctatttgatgtttttatgcaagaacttttatgtaaagatatattagacaatgtccgtaaattctataaggctgccactaagagactttaatgggaaggctttatattatagcaaggacaatattttcgtctttgtctttggcccataaatgccatcagcagtcaggccgtacatggactggaatcgtttgactgctttgctgttttcgggccgatgaaattgagaactctgtcccattcatattattcactttcctaagaaggggattaaatttgcggtgaagttgtcgcgcctgtccttttaaagtctcctccaaaacacccccaaatgaaaacatgagaatacatggttttacaaagcgcctgaaagcaagcgattaaatttatcaacgcaaaaccttgatatatagggcttttaaaacatttttagttaaaagtctacaaattaatcagattattgtttataataagaataggcttaaacttaaataagcttataagaatttgttatgttcctctataagcatatcggttatgtaaccgcaatcagtgaaatgtaagcattttcttaaaggggaaagggattgtttgcatgactcattttaagtaagccgtatgttttatatactctttaaaggggaattttgattgaaaaggagaggttgaatatgacagcaacacgcggtcttgaaggggttgtagcaacaacatcatctgtaagctctattatcgacgatacccttacatatgtagggtacgatattgacgacttgacagagaatgcaagttttgaagaaatcatttatttgctgtggcatctgcgcctgccgaataaaacggaacttgctgaactgaaaaaacagcttgcgaaagaagctgccgttccacaagaaatcattgagcacttcaaatcatatcccctcaataacgtacatccaatggctgcgctccggacggcgatttcattactcggtctgactgacagtgaagccgatgttatgaatccggaagcgaactacagaaaagccatccgtctgcaggcgaaagtgccgggcattgtcgccgctttctcaagaatccgcaaaggacttgatcctgttgaaccgaaggaagagtacggaatcgcggagaacttcctttacaccttaaacggtgaagagccttctccgatcgaagtggaagcgtttaacaaagcgctcattcttcatgcggatcatgagctgaacgcatcaacatttacggcgagagtatgtgtcgccaccttatctgatatttactcaggcatcactgccgccatcggcgctttaaaaggaccgcttcacggcggagccaatgaagccgtcatgaaaatgctgacagaaatcggcgaagtggaaaacgccgagccttatatccgcagcaaaatggagaaaaaggaaaaagtaatgggcttcggacaccgtgtgtataagcatggagacccgcgcgccaaacacttaaaagaaatgagcaaacgcctgacgaatctgacgggggaaagcaaatggtatgagatgtcaatccgtgtcgaagaaatcgtgacgtcggagaaaaaactcccgcctaacgttgatttctattccgcatctgtataccacagtctcggcattgatcacgatctgttcacgccgatctttgcggtcagcagaatgtcaggatggatcgcccatattcttgaacagtacgataacaaccgcctcatccgcccgcgcgctgattacacgggtccggataagcagacttttgttccgattgatgaaagagcctgatcaaacgggaggctggtgattttcatgtcgttagcctcttgttaatcaagcccggattggtttacaattttgatagaatcttgagaaaagtcattttattttctatacaagaaaaataaaatgttttctaaatatgaattacatactgggaggtaatattgtgtcacaaggtgaaaaaattacagtctctaatggagtattaaacgtaccaaataatccgattatcccgtttattgaaggcgacggcacaggccctgatatttggaacgccgcttctaaagtattggaagccgctgttgaaaaagcatataaaggcgagaaaaaaatcacgtggaaagaagtttatgccggtgaaaaggcttataataaaacaggtgagtggcttcctgccgaaacgctggaagacatcagagagtacttcatcgccatcaaaggtcctctgacgacaccggtcggcggcggtatccgttctctgaacgtggcgctgagacaggagcttgatttgtttacgtgcctgcgccctgtcagatatttcacgggagtgccttctccggtcaaacgacctgaagatacggatatggtcattttccgcgagaatacggaagatatttatgccggaattgagtatgcgaaaggttctgaagaggttgaaaagctgatcagcttcctgcaaaatgaaatgggtgttaacaaaatccgtttccctgaaacgtcaggaatcggcatcaaacctgtttctgaagaaggcacaagccgcttagtcagagctgccattgagtatgcgatcgaaaacggccgtaagtctgtcacgcttgtccacaaaggaaacatcatgaagttcactgaaggggcatttaaaaactggggctacgagcttgccgaaagagaatacggagataaagtattcacttgggctgaatatgaccgcattgtcgaaaaagacggaaaagaagctgctgataaagcgcagagcgacgcggaagcggcaggaaaaatcatcgtcaaagacagcatcgctgatattttccttcagcagatcttaacccgtccgagcgaattcgacgtcgtggcgacaatgaacttaaacggagactatatctctgatgcgcttgccgctcaggtaggcggaatcggaatcgcgccgggagcgaacatcaactatgaaacagggcatgcgattttcgaagcgactcacggaacggctccaaagtatgccggccttgacaaagtcaacccgtcatccgtcatcctttcaggagtgcttcttcttgaacacctgaactggaatgaggctgctgacttgatcattaaatctatggaaaaaacgattgcttcaaaagtagtaacgtacgattttgctagattaatggacggcgcaactgaagtgaaatgttcagagtttggtgaagagctaattaaaaacatggactgaacctaaagcagacttctaatgaagccaaaaaaggagaagagaatcatgggaaaaacacgcagtaaagtttctgttatcggagcaggatttacgggagcgacaacagcctttctgacagctcaaaaagagcttgcggacgttgtgctcgttgatattccgcaattagaaaacccgacaaaaggaaaagcgctagacatgctcgaagcaagtccggtccaaggatttgacgcgaaaatcacaggcacgtccaactacgaggacacagccggttctgatatcgtcgtcatcacagccggaattgcgagaaaaccgggcatgagccgtgatgatctcgtatctacaaacgaaaaaatcatgagaagcgtcacacgtgagatcgtgaaatattctcctgactgcattatcgttgtattgacaaaccctgttgatgcgatgacatatgcggtgtacaaagaatcaggcttcccgaaagaacgcgtcatcggacaatccggagtgcttgacactgcacgattcagaacattcgtcgctgaagaattaaacctgtctgtaaaagatgtgaccggttttgttcttggcggacacggtgacgacatggttcctctcgtccgttattcctatgcgggcggcattccgcttgaaacgcttatcccgaaagaccgtcttgatgcgattgtagaacgtacaagaaaaggcggcggggaaatcgtcaaccttctcggcaacggaagcgcctactacgcgcctgctgcatcactgactgaaatggtagaagccattttgaaagatcagcgccgcgtgcttccgaccatcgcttacttagaaggcgaatacggtcatgaaggcatttacttaggcgtaccgacgattatcggaggaaacggcctagagcaaatcatcgagcttgaactgacagactatgaaaaagcgcagctgagtaaatcagttgaatctgtcaaaaatgtgatgaaagtattgtcataagaaaaaagggaaggcttccgaatcagaagccttcctctttttacaattaatgaaagcgttttctttttccctgagcgatcctttctctgaaaatgatcaaaaaggcgaattgtctgaacgggcagtattggataaaatgaaatcataaagtgatatgcagcacataaaatagagaaaattggatgtcggggaaaatagacagcggagggcgcagcatgaacaaaaaaattttagttgtagatgatgaacaatctatcgttactcttttacagtataatctggaacggtccggctatgatgtcattaccgcatcagacggagaagaggctctggagctggcagagaatgaaaatccggatttaatcgtactggatgtcatgctgccgaaagtggacggaatcgacgtctgtaagcagctcagacagcagaaaatgatggtcccgatcttgatgctgacagcaaaagatgaggagtttgataaagtgctgggactggagctcggagcggatgattacatgacaaagccgttcagtccgcgggaagtcactgcgcgggtgaaagccattttaagaagggctgacatttcttcgctgtcacaaggcagagaagaggaaaaggacgggcagatcctcatcggcgagctgaaaattcttccggagcattacgaagcgtacttcaagtcagaacagctggaattgacgcctaaagaatttgaactgcttctgtatttgggaaaacataagggaagagtgctgacgagagatcttctgctgagcgcggtctggaactatgattttgccggggatacccggattgttgacgttcatatcagtcatctgcgcgacaaaatcgaatcaaataccaaaaaacccatctatattaaaacaatcagaggtttggggtataaactggaggagccaaaaatgaatgaataaagtccgtgtgcgtctgttcgctttactcgttgtatgtatcatattggttttcagtgttctcggcctttttttacagcagcttatttcttcatccgctgaagaaagaacggcggatcagctgaaaaaggaatcggtatacatagcgggccttcttgacaccggccgaatcggcaataaaagcaatgaaacggtaatccgtgacgccggccgcaccctcggtataaacgtcgccgtgctcaatgagaagggtgacgccgtatatcattccggcagtcatgctgatgattcagccgtaaaggagttcatttctcacaataaaagcgaggaagccgtacagtcgaaaagcaaagtcatccgcggcactgccgtaaaaaatgacgccgggaaaattgcggggtatgtactcgtttcctctgagatcaacggcggttcaagcgttaccggagaaatgtggggcatgctggcagcaagtctttgtaccgcttttatcattatcgttttcttttatacaaacatgacgtcccgttacaaaaaatcaatcgacgccgcgacaaaagtggcgacggagctgtccaaggggaattatgacgcccgctcctacagcggttacgcaaggcggtcggaccgtctcgggcgtgcgatgaacagcctggcggtcgatttaatggaaatgacgagaacgcaggatatgcagcgcgatcgtctgttaaccgtcattgaaaatatcggatccggtttgattttaatagacgggagaggttttatcaatctcgtgaaccggtcatacacgaagcagtttcatacaaagcctgaacgtctgcttcggcgtctttaccatgatgcgtttgaacatgaggagatcattcggcttgtcgaagacatttttatgacggagacgaaaaaatgccagctgctcagacttcccatcaacattgagcggcgctactttgaagttgacggcgttccgatcatgggccctgacgatgaatggaagggcatcgtcctcgtctttcacgatatgacggaaattaaaaaattggagcagatgagaaaggacttcgtcgccaatgtctcccatgaactgaaaacaccgatcacctcgattaaaggctttacggaaacactgttagacggagcgatgaaagacgaaaaggcgctttcagactttctgtctatcattctgaaagaaagtgagcggctccaatctctcgtgcaggatttactggatttatccaagatggagcagcaaaactttacgatgcgcgtagagtcctttgacgccgcaaaaatcctccatgaaatcgaagcccttttacagcataaggctgaggaaaaaggcatcagttttcagctcgatcttccggaggagccgatttttgtgatgggtgatgtgcacaggctgaagcaggtattcctgaatctggcgaacaacgctttaacctacacgcctgaaaaagggacggtggcgatttcggtaaatgtgaaagaaaccgctgtcgatatcaaagtgtccgatacgggaatcggcattcagaaggaagagattccgcggatatttgagagattctaccgcgtggataaagacagaagccgcaactcgggaggaaccgggctcggtcttgccatcgtaaagcacttaatagaagcccatgaaggtaaaatcgaggtcacaagcgagccgggacaggggactgtatttaccgtgacgctgaagcggcagccggaagcgtgatcagctttacaaaggattaacaatttcttcatgacctgttaaacctatcttgttaggatgtaacagaaccccttcatccaaggagccaattttgacggcgggaacgtgttttcttgttcccgtccttttttgcgttttcacggggttcgctcattttcctttcaaattgaactttgttaaaataagagaagctgtgagattaaaaaatagaggaatgacgagcttttgctcttaggaggatattgaatgacggaacgaaaaaaattagtgcttgtcgacggaaacagtctggcgtaccgagcgttttttgcattgccgcttttaagcaatgaaaaaggcatccatacaaatgccgtatacgggtttgcgatgattttaatgaaaatgctggaagatgaaaagccgacccacatgctggtggcttttgatgcggggaaaaccactttccgccacagcacgtttaaagaatataaaggcggaagacaaaaaacgccgccggagctttcagaacagatgccgttcatccgcgagctccttgatgcctataacatcagccgctacgagcttcctgaatatgaagcggacgatattatcggcacccttgctgtatctgctgaaaaagaaggcttcgaagtaaaggtagtttcgggggacaaggacttaacccagcttgcaaccgggaaaacgaccgttgccattacgagaaaaggcattactgacgtggaagattacacgccggagcacgtgcaagaaaagtacggtctgacccctttgcaaatcattgatatgaagggattaatgggggattcatccgataacataccgggcgtccccggcgtcggagaaaaaaccgcgattaagctcttaaagcagttccattcggttgagaaactgcttgattccattgatgaagtcagcggaaaaaaattaaaagaaaagcttgaagaatacaaggaacaagccctgatgagcaaagagctggcgacgattatgacaaatgcgccgattgaagtcaagcccgaagatttaggttaccaagggtttgaccgtgaacaagttgttgccatttttaaagacctgggttttaatacgcttcttgagcggctcggtgaagaaagcggggaaacggcggaagaaaattttgaagacatcaatgtcgaaatggcagaagaaatcaccgaagatatgctcgtttcgccgtccgctttggtcgtcgaacaaatcggtgataactatcacgaagaaccgatcctcggcttttccatcgtgaatgaaacaggtctttattatattccgaaagaaatcgccattcagtctgaagcttttaaatcttgggctgaagatgaatcgatgaaaaagtgggtgttcgacagcaaacgttccgtcgtcgctttgcgctggcagggaattgagctgaagggaacggaatttgacgcgcttcttgctgcctacattataaacccgggcaattcgtacgacgatgtcgcgagcgtagcgaaagaatacgggctgaatatcgtttcaaaagatgaagcggtctacggaaaaggcgcaaagcgcgccgttccggctgaaaaagagcttgccgatcatctcgcgcggaaagcgtctgccgttaacagcctccgtgacaaactgctgcacgcgctggaagaaaataatcagcttgaattatatgaagatctcgaactcccgcttgcgctaattctcggagaaatggaatcaatgggcgtcaaagtggatgttgaaagactgaagcgaatgggcgaagagctcaaggcaaagctgaaagaatatgaagaaaaaatccatgacatcgccggtgagccgtttaacatcaattcaccaaaacagctcggcgtcattctgtttgaaaagctcggcctgccgccagtaaagaaaacaaaaacaggctattccacttcagccgatgtgcttgagaagctcgcagacaaacatgatatcgtcgcgcacattctgcaatacagacaaatcggcaaactccaatcgacttatattgaagggctgctgaaggtcacgcgcaaggattctcataaggtgcatacacgattcaatcaggcattgactcaaaccggacgcctcagctcaacggatccgaacctgcaaaatattccgatccggctggaggaagggcggaaaatccgtcaggctttcgtaccgtccgaaccggactggcttattttcgccgccgattattcacaaattgaattaagggtgcttgcgcatatttcaaaagatgaaaatctgatcgaagcgtttacgaatgacatggacattcacacaaaaaccgccatggacgtgtttcatgtcagtgaagatgaagtgacacaagcgatgcgccgccaggcaaaggccgtcaatttcggcattgtttacggcatcagtgattacgggctgtcacaaaacctcggcatcacccggaaagaagcgggcgcttttatagaccgctatttggagagcttcccgggcgttaaggcgtatatggaagaatcggtgcaggaagcgaagcaaaaaggatatgtcacgacccttatgcagcgccgccgctatattcctgagctgaccagccgcaacttcaacctgcggagctttgcggaacggacggccatgaatacgccgattcagggaagcgccgccgatattattaaaaaagccatgattgacatggcagctgagctgaaagaaaaaaacctgaaggcgcgactgctgcttcaggtgcacgatgaattgatttttgaagcgcctaaggaagaaattgaaatattagagaagctggttcctgaagtgatggagcatgctttggcattagacgtgccgctgaaggcggattatgcttcagggccgtcttggtacgatgcaaaataaacagagaaaaaggaagtgatgattgtgccggaattaccagaagttgaaacggtccggcgcactctgaccggtcttgtgaaggggaaaacgattgaatcggcggatatcagatggccgaatatcatcaaaaaacccgccgagccggaggaattcgcgcggcagattgcaggagaaacaatccgatccatcggaagaaggggaaagtttttgcttttccatctggatcattatgtcatggtgtcccacctgcggatggaggggaaatacggtcttcatcaggccgatgagcctgacgataaacatgtgcacgtcgtgtttcacatgacggacggaacacagctccgctaccgggatgtccggaaattcggcacgatgcatttgtttgcgccgggagaggaacagaatgcattaccgctttcacagctcgggcccgaacccgatgatgaagcatttaccgctgcttatttaaaagagcggcttgcaaaaacgaaccgcgcggtgaaaacagccctgctcgaccaaaaagcggtcgtcggcctcggcaatatttatgtcgatgaagctttattccgggcgcgtattcatccagagacaaaagcgaacagtctgtcagacgggcagataaaaacgcttcatacagaaattaaagacacccttcaggaagcgattgacgcgggcgggagcaccgtccggtcttatatcaattctcaaggggaaattggaatgtttcagctcaaacattacgtatacggcaaaaaggatgaaccgtgcaaatcgtgcggcacgatgatttctaaaatcgtggtcggcggaaggggtacgcatttttgcgcccgctgccaaaaaaaatcataaactgaagcggttcaagcaggcggcagcagaatgacttttttctaacacagttgatgacctttctccatatatatattgtgattcacccaataggcatatgtcacaattgccgatcaagagaaagggagaaacggatatggagattgtttctttgctgcttttggcttttgctgtcagcttggacagtttttcagtcgggtttacgtatggtttgagaaaaatgaaaatcccgttcaaagcgattgccgtgatcgcttgctgttcagcctctgtgatgtttatatccatgctgatcggccattttctgacaaagatttttcccgtatccgtcacggagaaactgggcggactgatcttaatcggaatcggggcatgggtcatctggcaatttttcaaaccggctaaagagccggattacttattgcatgaaaaaacgttacttaatcttgaagtgaaatcgctcggcatcgtcattcatattttgaaaaaaccgaccagcgccgatattgatcaatccggaaccattaatggagtcgaggcgtttctgctcggtatcgccttatccattgacgcgtttggcgccgggctgggagcggccattctcggcttttctccggttatgatgagcgtgactgtcgggctgatgagctcgctgtttgtttcactcggcataaatgcggggcatttgctttcaagatggaattggatagataaaatgacatttttgccgggagtcctgctgattatcatcgggatttggaaaatgtaagaaggagtgggctttttgagcttggtcatcggtttaacgggaggcatcgcaagcggcaaaagcacggtagcgcgtatgctgatcgacaaaaaaataacagtcattgatgcggatgccatcgcaaaacaggcggtggaaaaaggaatgccggcttacggacaaattgtggaagcattcggaaaagacatcctgctggaaaatggcgatattgacagaaaaaaactcggttctatcgttttcactgacgaacaaaaacgtctgaagctgaatcagatcgttcatccggcggtgcgtgcggaaatgctgaaacagcgggatgaagccgttgcgcgaaaagagcagttcgtcgttttggatataccgcttttgtatgaaagcgggcttgattatcttgtcggcaaggtgctcgtcgtcaccgtaccggcagacattcagcttaaacggctgatagagcggaattcccttacagaagaagaagcgatgagccggataacgtcgcaaatgcctttagcggataaaacaaaaaaagctgacgccgtcattgataacagcggcagtcttgaatatacaaagcaccagcttgaggaagtattgagcggctgggcataaacaaacaccgttcggaaagccgaacggtgtttgtctggttaaaaatcaaaattgtcagggtccggaccgacacggaggttttcgttcagatcatcaatccgcttcatatcgtcagctgacagttcgaaatcaaagacatttgcattttcttcaatacggtgttttttcgttgatttcggaatggtgatgacaccgttttgcaaatcccagcgcaaaatcacttgagcggctgatttgccgtacttctcagcgatttcctgtaagacggtgtgatcaagcagctgaccttgcatcaatggcgaccacgcttcaagctgaatgccttgttcagtgcagaaagcaagcagttctttctgtgtcagatgaggatggtactccacctggttgatcatcggcttgatttccgtctctttcatgagatgtttcagatggtgaatttggaaattgctgaccccgatcgccttaatgcgtccatcccggtagagggtttcgagcgcccgccacgcatcgatgtactttccttcgacaggccaatggatcaaatataaatccaaataatctaaaccgagtttttctaagcttgtgtcaaacgcttttaacgtttcttcatatcctaaatcggcattccatacttttgacgtgacaaaaatgtcttcacgttttaatcccgcttcttgcagcccttggcggatgccttcgccgacaccttcttcatttccgtaaatcgcggcggtatcaacgctgcgatagccgtgcaccaatgccgttttcaccgcgttgacgagttccgcgccttcctctactttgaaaactccgatgccgaaccaaggcatttctactccgttatgcaatgttgcttttgcttgtaaatgtgttgtcatgtatatattcctcctattagttgtctgttgaaacaatcaaaatgcgctgaagaaaaactcacctcctttcaagggcagtgcgatcccgcttttcaagcttcctgctccatccggttaatacgaccgcgctgagcaccatcagcgccccgatccaagcggtatgaatgattccgattgagtctgtaatgattccgccggcaaacgagccgatcgcgattccggcattaaatgccgcgatatttaaggctgatgctgtatcaacggcgcttggcgcaaaacgttcactcagcatcacaacatatacctgaagccccggcacattcataaacgccaacagccccatgaaaataatggtgatcagcccggctgttttaaacggcgcggtaaaagtcagaacaaacagcacagcagcctggacaatgaacatataaaacaaggctttcagcggatttcggtttgataaacggccgccaatcatgtttccgatggcaatcgcaattccgtaaacgagcaggatggccgcgacggtttctttctgaaaaccggttacctcctgaagaagcggagataaatacgtaaacacgacaaacgttccgccgtagcctaacgccgtaatcataaataaaagcaataaccggccgtttgtgacgagtttgacctgctcggaaaatgcggttttcgtccctttgcgcaaatgcgacggaacgaggagcgcgtttgtgaggaatgcgatgattcctactgccacaatgacggcaaatgcgattctccatccgaattgctggccgagataggtgccgaacggaacgccggtcaccgtagccaccgtcagtcccgtaaacatgatagaaatcgcgcttgctcttttatgctccggcacgatattggcggcgattgttgccccgattgacatgaaaatgccgtgggaaaaagccgaaataacccgtgccgccagtaagacgccgattgaggaagcgctcgctgcgagtgtatttccggcgataaaaattaacatcacccagagcagcagcgttttccgcgacatgccggatgtgagagacgttaaaaccggcgcgccgaatgtcacgcccagagcatacatggaaacggtaagtcccgccgttgtcacaggtatatgcagatcttgagatataagcggcagcagcccgacgctgataaattcggttgtgccgatcgcaaaagcgctgacggctaatgccagcagcgctggtaaatagctttggcgatgtgaagacatctgttttcctccttgaacgataatgtatggttgaaatgatgccgggtaaacgatataagtataagagtacattccttttcagccggcaaatgtcattatgatcgatagaagtgtcattgaaaagaacgtacttttaagtgccataggcactttttagttcctatagatgaggaggaattaccgttgctgaagaaaaaatacaatatatccgtagaggcggcgcttgaagtgatcggcggaaaatggaagtgtgtgatcctctgccacctcatgcgcgggaaaaaacggacaagcgaattgaagcggcttatgccggacatcacccagaagatgctgacacagcaattgcgggagctggaagctgacggcgtcatcaaccggatcgtgtacaatcaggtgccgccgaaagtggaatacgagctgagtgaatacgggcacagtctggaaagaattttaaacgcgctgtgcgactggggcgcgatgcatattgctaaacggtacggcgaggtgtcttccgttttagaggacagcattttaaatgacaaatttaaagaaccgggacaaatataagaaaaaagcaggcagcctgagacgctgatcctgctttttttatggaagaaagatcattttatatgcaaaaaaaccgattgaacaacatattgatcggtataagggtggatttttatcaagttgtactggcggatttcttttaatgtgttatactatatataaataaaggtaaattagagtggcatattaaaaaggggtgacctgagcatgaaggtaaaagtagcaatcaacgggtttggaagaatcggaagaatggtgttcagaaaagcaatggaagatgatcaaattcaaataacagccattaatgcaagctatcccccggaaacgcttgctcatttgataaagtatgacacaattcacggcaaatatgatcaagaagttgagacctccgacgacagcctgatcgtcaacggaaaacatattatgctgttcaaccgccgggacccgagagagcttccgtggaaagaatgcggaatagacatcgtcgtagaggcaacggggaaatttaattcaaaagaaaaagcgatgagccatattgaagcaggggcgaaaaaagtcattttaacggctccgggcaaaaatgaagacgttaccattgtcatgggagtaaatgaagagcagttcaatcccgatgaacatgtcattatttcaaatgcatcctgcacgacaaactgtcttgcgccagtcgtcaaagtgcttgatcaggaattcgggattgaaagcggcctgatgacgactgttcacgcttacacgaatgatcaaaaaaatatcgacaatccgcataaagatctgcggagggcgagagcgtgcggagaatccatcattccgacttctactggcgccgccaaagcgctgtcgctcgtgctgcctcatttgaaaggaaaacttcacggtctcgctttgcgtgttcccgttccgaatgtgtcattagtggaccttgtctgcgatctgaaaacagatgtgtcggccgagcaagtgaacgccgctttccaaagagccgcaaaaacgtcgatgtacggaattcttgattattcggatgagccgctcgtttcttcggattataatacgaattcacactctgcgatcatcgacggtctgacaacgatggtgatggaagaccgaaaagtaaaggtgctcgcctggtatgacaatgaatggggatattcctgccgggtcgttgatctaatccgtcacgtcgccgcgcgaatgaaacacccgtcagctgtgtagactaaagatcatggacatttgttagaaaaaaacccttaacggcatattcgcaaaaaacacaccttgcaaaataaacttaaacacagtatactatctttcgtgaacttcttgctcgtgactgcttcggaattacttaaagggttaggacctctccggactaactttcccccgtggtaaatggccgggtcagttctcggaaattcacttttttaattcttgttaaggggggtccatgattatggaaacaatggggcgtcacgtcatctccgagctgtggggatgcgattttgataagctcaatgacatggattttattgaaaaaacgtttgtaaatgctgctttgaaatcaggagctgaggtgcgcgaggtcgcatttcacaaatttgcaccgcaaggcgtaagcggagtcgttattatctctgagtcacatttaacgattcacagttttcctgaacacggatatgcaagcattgatgtttatacttgtggagacctggatcctaatgtggctgcggattacattgcggacgcattacatgcagatacaagagaaaacattgaaataccgagaggaatggggcctgtacagattaaacaggcacaagcgaaagtactgtaattttcaaaacgcaaacacaagggagctaagctgaaaaagccattacgcgctttgaagctgatgctccttttctaatgtaaaaaaacagcattgctttttctttaagcattttttttgtaaaatagaaaagataaggccggtctatcggctctcccaacaaataggctcatcctagaaacgttggcgggcatttaccggaagcttgcgaaccgcattacagcaacgaaacagatgggagctgatccaatttgaaatgtccttcatgccagcacaacggttcccgcgtacttgattcacggcctgcggacgaagggaaatcaatccgcagaaggcgggaatgcgaagcctgccattaccgcttcactacatttgagaagtttgaagagatgcctctgatcgtcgtgaaaaaagaaggcgtccgggaagaattcagccgtgaaaaaatgctgcgcgggttaattaaagcttgtgaaaaaaggcccgttcctttaaaaacattggaagacatgtgctttgacattgaaaaagagctgagaaaccaaggtgtatctgaagtcaaaagcgaacttgtcggagaaatggtaatggaccgtctggcgaaaatcgatgaggtgtcttatgtccgctttgcctccgtctaccggcagtttaaggatataaacgtgtttatcgatgaattgaaagatttaataaagaaagaacgctgagagagctaagagattgtgtctggctcttttctcatgagcaaaattggcatttgatagatcgcagaaacggtgtaaaatgagagtagaaacatatcggaaggtttgagaatcatggctgactattggaatgacgtattgcctgtagatccttatacggtcaaaagccgttcgcttcttcaggatgtcgacagacaggttttgacacatctgtaccagccgctgatcggttcttttgcattctccctttatatgaccttatggggggagcttgagcagaaccgcttgtggggagcggaatccacgcacaggcagctgatgggcatgatgcagtcaaatttaaaaaagattcatcatgaacagggaaagcttgaaggaatcgggctgctgaaagtgtatatccgggagtccgagcagaaagagcggatgtttatttatgagctgctgcccccgctcagaccgaatgatttttttgaagacggcatgctgaatgtctttctttataacagagtcggtaaaacgaaataccagcagctgagacaattttacacgcacccttccgtcggcgcgggcgcaagggaaattacccgtccgtttaatcacgcttttgcctcttttcagccgagtgaatggaaaatgacgcctgatatggaagaggcgatgaagctccccgaggactatgagacggcgtctgtcggacaagcgccttcctatacggtgacggaggaagtatttgattttgagcttttcatggcgggactgtcagaaacgatgataccgcgtaaatcaatcacgcaggacgtgcgggagagcattaaaaagctttcatatttatacggaatagatcctatctccatgcagcacgtcgtcatgaccgcaattaatgaacaggatacgataacggccgaagcgctgaggaaagcggccagcgactggtaccaaattgaaagaagcggtaagcttccggaactgattgataaaacacagcctgtcaccttgagagaaaaccggacggaaaaggacgattcattgaacggcgaactcatcgcacagcttgagaccatatcaccgagaaagcttcttcaggacattgcggacgggaccgagccgtcaaaagccgacttgcagattatcgccgatattatgttcgaacaaaagcttgagcccggcgtcaccaatgtgctgatttattatgtcatgctgaaaacggatatgaagctgtctaaaaactatatccaaaaaatcgccgcccactgggccagaaaaaaagtcaaaacggtacgggaagcaatgaaactcgcaatagaagagcacaggcaatatcttgattgggcggacggcaaaacaaacggcgcggcgcgcggcaaaaaaaccgtccgggaagaaaagcgccctgattggatgaaagaagaagaaaccgggaagaaacaagaacagccggctctttccgcgcaggatcttgaagaacagaagaaaaaaatgatggaagaaatgaaaaaactgaaaaaatactctgcctattgagacagagaagcggggtgatattgaatggaaccgatcagccgatccttagaaggcgtgacgaaaagacctgactttcaaaaacgcctggaacgaatgcagcagcaagtcatggccgacgaagacgtccaggcttttttgaaggaacagaaagatgtaatcaatcaaagcatgattgacagagggttaaataaactgtacgaattcgttcagcaaagcaaacagtgcgccttctgctcgaaagacagccggacgaacagcctgcttgaaggctatcatccgaagcttgtgatcaacgggcgttccatcgatattgaatattacgaatgtccggaaaagagaaagctcgaccgtcagaaaaggcaaaagtccctgatgaagagcatgtatatccagcaggatcttctcggcgcgacgtttcagcagatcgacattaccgatccgagcagagtcggcattttccagcatgtgacggattttctgaagagctataatgaaacgggaaaaggcaaagggctgtatctgtacggaaaattcggaatcggaaagacatttattttagccgccattgctaacgaactggcggaaaaagagtattcatcaatgattgtatatgttcccgaatttgtcagagagctgaaaaactcgctccaggatcagtcgttggaggcgaaactgaatatggtgaaaacgacgcccgtactgatgcttgatgacatcggagcggaatcaatgacaagctgggtcagagatgaagtcatcggcaccgtgcttcagcacagaatgagccagcagcttcccactttcttctcgtctaatttttcaccagacgagctgaagcatcattttacgtattcacagcggggagaaaaggaagaagtaaaagcggcaagactgatggagcggattttatatttggcttcgcccgtccgtcttgacggggaaaaccgccgccgttcatgatgccggcgtccaatgggaaggatttgagggaatgaggaataagaaggctgtcacttgggctgcggctgcggcgggagcgggccttttgctgtgggcaaaccgcaaatatctgaatctgtcgcctaaggagatccggctgtgggtgttatcgttcggtgtttttgcgccgcttgtgtttatcggaatttccatcgtcaggccttttgtgctgtttcccgtatcaatcgtttccgtcgccggaggattggcgttcggcccgcttttcggcaccgtgtatacgctggcgggctcaatgggcgccgccgccgcgtctttttttgcggcggggctgtttgcctttaatgagaaaagccgtcatggaaaaatggaagccattcaaaagcagatgaaaaccaatggcttcttttatatttttatcctgcgtattctgcctgttaactttgatgtgatcagctatgccgcgggcctatcgaaagtcaggccgatgacgtattttttggcgaccgcagcgggcatcattccggggacgatcgtcctgaatgtgctcggcgcgagctttatgtccggcaatgtgctgaccgtactcggcgtgatctgtctttacatcgtatttttatcgcttcccgttatatttaaaaagaaggtgcgccatttgttcggcggtgaaagctaacctttacgtctattttaaaaacatcccccatatacttgtaacagatgccgtaaggggggacaaatatgcttgaagtgatctttgaagatgaccacgataccgccgcttttttacatctcattcagcaatcggacgaccggagacattttattgtccgtgaaggcataaaaaaagtcggaatcgcaaggtctgaaacggctttttgcgttcagcgctttattgagccgatacttgtcaggttttttttggaatgcaaagaagacgagcatatgctttcgcttattgaggacgcatactgcttcaccgatcaggatgaacagcagcaaatccttcagcttgcacacagcattatggaaggagagcttgatgatcatccgttcgagccgaagaaagagccgcgcacacagtttatttcagatgcgctccggacgatttcacttgatgcgggtgttttttccgtgcgttcgtttcagacgttccggctcggcaggtattatgagcggctcagagaatacgcggaggctgcgatagatgaataccggatggaacaggaatatcaaaactttatccagtctctgagagattatgtgacatccaatccgccgcggatgaagaaagtccgcatcgtacatgaccgggcttttacgctgtgggagctgcgctatttgtcagaacgggaacagaaaaaatacatagacagacggtttgtgcgggagcacccgatgtatatagattcccatctccttgcgccgctgatctccattgcgcctgagacggtagaactgtatacggacaaaccggagcatatgatgtccagaacgattcaaaacgtgtttcaggagagggtgcgcctttttccgctgggcgcatttgcagccgagaagacggaaggatagccgcacggacggccttgtgtaagcggcaaggctgtctttgcgaaatcagacggaaaaccgagttgcatttttctcacagacattttataatacataaaagattaatgattgctacacgtattgataaggacatgaagcattgataccggctttataagagaggagagcccaggctgaaagctttccagctatggatcattgtctttaccgcctttgaacttcagctgtgaacgccggaagaagcgccagtaatagctgacgggaactcccgttacagagtttagagccgcaggtgccgaaacaatcggccgcgcggaaaaaagggtggaaccacgattccgtttatttaacctcgtccctttcatagggggcggggtttttgatttgcataaaaaaaggagtgacgaagatgtcagatatgatcaacatcacatttccggacggagcggtaaaggaatttccgaaaggaacaacaacagaagatatcgcggcatccatcagtccgggattaaagaaaaagtctttagccggaaaactgaacggacaggaaattgatttaagaacgccgattcaagaggatggtgccgtagaaatcattacagaaggcacagaagaaggcttgaacatcatgcggcacagcacggcgcatttattggcccaggcgattaaacgcatttataaagatgtgaaattcggagtcggccccgtcattgaaaacgggttctattatgacgttgaaatggagcaggcgctgacgccggatgaccttccgaagattgaaaaagaaatgaaacgcatcgtcggtgaaaatctgccgattatccgaaaagaagtgagccgtgatgaagcaaaagccatgtttgcggaaatcggcgataatctgaagcttgaactgctggatgccatccctgaagacgaaacggtctccatttatgagcagggcgaattttttgacctgtgccgcggcgtgcacgtgccgtctacaggcaaaattaaagaatttaagctactgagccttgcgggcgcatactggcgcggcgacagcaaaaaccaaatgcttcagcgcatttacggcacggccttctttaaaaaggatgacctgaaagagcatttgcggatgcttgaagaagcgaaagaacgtgaccaccgaaaactgggcaaagaattaaaattgttcgccaactctcaaaaagtcggacaaggcctgccgctctggctgccgaaaggcgcaaccatccgccgcgtgatcgagcgctacattgtggataaagagctgagcctcggttatgagcacgtctatacgcctgttctcggaagcaaagacctgtacgaaacatcgggccactgggaacattatcaggaaggcatgttcccgccgatggaaatggacaatgaaacactcgtgctccgtccgatgaactgtcctcaccatatgatgatttacaaacaggacattcacagctaccgcgagcttccgatccgcatcgcagagctgggaacgatgcatcgttatgaaatgtccggggcgctttcaggtcttcagcgcgtacgcggcatgacgttaaatgacgcgcacattttcgtccgccctgaccagattaaagaagaattcatccgcacggtccgtttgattcaagacgtatacgaagacttcggcctgagtgattacacattccgcctgtcttaccgcgatcctgaagatacggaaaaatattttgatgatgatgagatgtggaacaaagcgcaatccatgctgaaggcggcaatggacgaaatcggccatgactactatgaagcggaaggcgaagcggcgttttacggccctaagcttgacgtacaggtgaaaacagcgatcggcaaagaagagacattgtcaactgtacagcttgacttccttcttccggaacgctttgatctcacttacgtcggagaagacggcaaacagcaccgccctgtcgttattcaccgcggtgtcgtgtcaacgatggagcgtttcgttgctttcttaatcgaagagcacaaaggcgcccttccgacatggcttgcgccggtgcagttccaagtcattcctgtatcaccgtccgtgcatcttgactatgcgaaaaaagtgcaggagcgcctgcagcgtgaaggcctgcgtgtcgagcttgacagccgggacgagaaaatcggctataaaatccgtgaagcgcaaatgcaaaaaatcccgtacatgcttgtggtcggtgaccaagaagcggaaaacggcgcggtaaacgtccggaaatacggcgagcagaaatcagaaaccgtctcattggacgattttgtgaaaaaggctgtagccgaagcgaaaaaataaccggaaatacaaaaaccccgttcattcagaatggggtttttttgcgtataaaattatctttctttttgtttctctataatcgcaaacagctcgtgaagatcgctgatcacgtaatcaggcgcaatgtccgtatcatttttcttttgcgtccggtttacccagactgtcgtaatgcctgcccgtttcgctcccaatatatcagtattgaggttatctccgaccataatggcgtcttcttttttcaggttcaggaggccgaggcaatgttcgaatatggaggcgtcgggtttcccttttccgaaagcgcctgagatgacgatttcattaaaataaggcgcaagctcaggaacgccggcgagtttttctttctgcaggctgggatcgccgtttgtcagcagaagcaattcataaacacctttcagcttatcaagcaccgcaaacgtttcatcatacacgtacggacgctgtctgcgttccgccgcgaaaaactccgccaaatattcgccgtaagccgcatcgtctataccgacgctttttaagccgttcgtccaggcgtttcgtctgtattccggcgcaatccgattcagctgtttaaatccttcgctgaccggctcggaaaaattcgcccacaatccttcaaacggattaatgccgatcatgaccgtataaggataggtttcgtatgacatatacaattcccgtgccgctttccgaaccgcatcttcaaatgtatgcgggtcaaggccatattttttttccgcttgtaaacatgtttccctgaatgttgttctgacgcttttttcatcccataacagtgtatcgtccaaatcaaaaaatacggctttcatgatcttctcctctttgttatattctgaaactctctgccgcaaggctcccgtttattctacaatagatatatagactgtgaaagatttgttttcagatgatttgaaaaaaacaggcaggtttgtgtcagattctgtctcaggctctaaaacgtgataaaattaaatttgaaagaacaggtgaaaagtatgctgcatttgatcatcatgatgctggaaagagtcggaattatcgtcatattgggatttgttctggctcataccagattgttcagacaggcgctccagcagcctgagagctataaaggcaaagcggtgctgatttcaattttctcgctgttcagtatcatcagcaactatacgggaatagaaattcagcggaatacaatcatgaataatgactgggtgtttcaaattaatccgtccggttcaattgccaatacaagaattatgggcgttgaaatcggcggactcttaggcggcccgtatgtggggatcggcgtcggcatactggccggcctgcatcgtttatcactcggcggcgcgaccgcagtcagctgtgccgtctcatccgttttagcgggcattttgtccggctggatcggacggtatttcagaaaacgctatgcgatgccgacaccgcgggtggccgcgcttgtcggactcgggatggaatcgctgcaaatgctgctcatcctcttgatggccaagccgttttctgatgcttggacgcttgtgagcatcatcggcatcccgatgatattggtaaacgggtcagggacttttatttttctttcgatcattcagtcgattatccggaaggaagaacgggcgagagcccttgaaacccacagggtgctgatgattgcagaccagacgcttccgtttttccgccaggggctgaatgaaagctcatgcaaaagcgtcgccgccatcattcacaggcaaacaggaacggacgcggtatcgcttacggataacgaaaagattttggcgcacgtcggcgcgggtgccgaccatcatattccgtctgaaagcctgatcaccggattgtcaaaacgtgtcattaaaacgggtcatattatgaaagcgacatcgaaggaagaaattgaatgcacgcacgatccctgtccgctgcatgcggcgatcgtattgccgctgacgtcaaacggcaaaacgatcgggacgttgaaaatgtactttaaaagcccgtcaggtttaagccgggttgaagaagagcttgcagaaggactcgccatgctgttttccacccagcttgaactcggcgaggcggaactgcagagcaaattgctgaaagacgcagaaataaaggcgcttcaggcacaggtcaatccgcattttctgtttaatgcgatcaatacgatttctgctctttgccgtacggatgtggaaaaaacccgaaagcttctgctgcagctgagcgtctatttccgttccaatctgcagggggcaaggcagctgctcatcccgctttctaaagaactgaaccatctgcaggcgtatttatcattggagcaggcccgttttcccgggaaatataaaatcagtcttgaaatcgaacgcggtttggaggacatcgaaattcctccttttgtgctgcagattctcgtcgaaaatgcgctccgccatgcattttcaagaaagcaggacagctgtgccgtcaatgtcagcgtggtatccgccggtcagtcggttttaatgcgggttggagataacgggcggggaattgatccggaattgctgtccgtgctcggaaaccgtccgctgccgtctaaagaagggacgggaaccgcgctttacaatttaaatcaacggctgatcgggctgttcggccccaaagcagccctgcgattggaaagtgaggccggcaaaggtacggacgtatcatttgagctgcctttgaaactgatgactaaaggagaagaacatgctgaaggtgttaatcgttgatgatgaaatgctggcaagagatgaattagcttatttgctgaaacggacgaatgaagtaagtgacataaacgaagctgaaaatattgaatccgcttttgacagtatgatggatcaaaaaccggatctgctgtttttggacgttgatttgtcaggagaaaacggatttgacattgccaaacggctgaaaaacatgaaaaatccgccggccgtcgtttttgcgacggcgtatgaccaatttgctttaaaagcctttgaagtcgacgcgctcgattatttaacgaagccttttgatgaagaaagagtgcgccagacgatcagaaagtttaaaagagtgaagcgggacagggcaggagccgtctcagagcagccgtccgcagccggagcgcataaactggctgtatcagccggtgaatctattgtcattttagatacgaaggacattattttcgccggcatggaggacggacacgtttccgttaaaacgtttgccgcgtcttattccgttcatgaaactttggcggtcattgagaaaaaactgcctgatacgggtttcttgagagtgcaccgcgcgttcatcgtgaatacggagcatattacggaaattcatccgtggtttaattcgacgtacaatcttatcttaaaagacggctctaaaattcccgtcagccgtacatacgccaaggacttaaaaaagctgcttcatattatatgaggcggcttttgcatttcagcagccgtttcttgcatttcagaatgaatattcagccgtttgttatgaaagcgctttaaaaggcgatttctcttttataatgaacctaacaaagagaaagaggtgaagaaaatgagtgcgaaaaaagtgtacggatttctgacacaagcatttatttttgccgtaattatgctcatatctaatgggattgcagcgattgtccccattcctatacccgcttccgtagtaggtttggtgttattatttgtcctcttatgcctgaaagtgattaagcttgaacaagtagaaacgctgggaacatcattaacgtcactcatcggatttttatttgtcccgtcgggcatctccgtgatgaattcacttggcgtcatgcagcagtacggcgtgcagatcgcactcgtcatcttactcgctaccatcattctgttaggggcgacgggccttttttctcagctgatcttgtctgtcagccaaaaacgtcagaaggcagctcctgaaaaacaaacggtgcgccgttccaatcaggaaaaagaacttgtgcagcattaggagggaaatcggatgagtccatatttcggtattgtcgtttcacttgcggcctttggcatcggcacgtatttatttaaaaaaacgagaggctttttcctcttcaccccgctgtttgtcgcgatggtgcttggaatcctttttctgaagctcggcggtttttcatatgaagattataaaagcgggggagacattattaaattcttcctggagcccgcgacgatcgcttttgcgatccctttatacaaacagcgtgacaaactgaaaaaatactggtggcagatcatgtcttctatcattgtcggctctatctgctcagtcacgattgtctatttgatcgcaaaaggcattcatcttgacgcggccgttatgaaaagcatgcttccgcaggcggcgacaacggcaattgcccttccgctgtcaaaaggaatcggcggcatcaccgacatcaccgctttcgccgttattttcaacgccgttatcgtctatgctctgggcgctctattcttaaaattgtttaaagtgaaacacccgatctctaaaggactggctctcggcacatccggacacgcactcggtgttgcggtcggtattgagatgggagaagtagaagcggcaatggcaagtatcgcggttgtcgtcgtaggagtggtgacggtgctggtcattccggtattcgttcagctcatcggaggataaacccgggtcatagacccgggtttttttattgtgttggcacgtccgcgtgcggcaaagaacgaaatttcacatttttccttgcgctcgccccggcatcgtgttaaaatgaaaaagttgatccggagaagtcattcttgactaatgatccggtattgtgtagaatagttattgaattgaatataaatcacaagcagaggcacccgcttctcacctgattgacacattcatgtagttggcaggttgaccgtacatttttatttatgcagatgttcgtagtgtgggtgtgttgtcatgcccgcactttttgtttgcctgcagaatgcagtcaacaagcgttgtgaatcaattcgaagaaactatggaggtggctcattattagcaaagatcaattggttaatgagggtatccgtgcacgtgaagttcgtctgatcggacaaaatggcgatcagctcggcatcaagtcccgtcaggaagcacttgaaatcgccggccgcgcaaatcttgaccttgtgttagttgcagcaaatgcaaaaccgcctgtctgccgcatcatggactacggtaagttcagattcgagcagcagaaaaaggacaaagaagcacgcaaaaatcaaaaaatcattaacttaaaagaagttagattaagtccgacgatcgatgagcatgactttaacacgaaattgcgcaatgcgattaaattccttgaaaaaggcgataaagtgaaagcttctatccgctttaaagggcgcgcaatcactcataaagaaatcggccagcgcgtattggaccgtttctctgaagcatgtgcggaagttgcgacagtcgaaacaaaaccaaaaatggatggccgcagcatgttcttaatgctcgcgccgaaaaacgaaaagcaataaggaggaaatcccatgccaaaaatgaaaactcaccgcggatctgctaaacgttttaaaaagacaggttctgggaagttaaaacgttctcatgcatacacaagtcacttattcgccaacaaatcccaaaagcaaaagcgtaagcttcgcaagggtgctattgtgagcgcaggagacttcaaacgcatcaaacaacagcttgccaacatcaagtaatcggacaaggaacaattaggagggaaatataatgccaagagtaaaaggcggaactgtgtcgcgtcagcgtcgtaaaaaggttcttaaattagcaaaaggttatttcggttcaaaacatagattatacaaagtagcaaaccagcaggtcatgaaatcaggaaactatgcattccgtgaccgccgtcagaaaaaacgtgatttccgtaagctttggatcactcgtatcaacgctgctgcacgtatgaacggtctttcttacagccgtttaatgcacggtcttaagctttcaggcatcgaagtaaaccgcaaaatgcttgctgatcttgctgtaaacgaccttactgctttcaatcagcttgctgatgctgctaaagctcagttagacaagtaagttgaaaaagccgctctctttccgggagcggtttttttacgtaaagggtgacaatcaatggctctcttcatttacgccgtattgataaacggatacggcttttggatcatgggcgctgataaaagaagagcaaaggcgcacaggtggagaatatcagagaaacgaatatggctcacagccgccatgttcggctcactcggcgtatggatcggcatgcgcaccttcaggcataagacgaaacacaaatcctttttatacggggtgccgctgctttttctcactgaagccgcccttgtgctgatgtatttggtgtataaagaataaaaagcaggagagcttatcgctcgcctgcttttttcgcttttttgatgggctggtcccaatcaatcttgcaattcggataccgctccaatacctttttttcgacttcttcaaaatcacctgcagaaaagcggttcagcttttccggattttcggtccatacaaatatcgtatgaataaacagcggatgatctttggaagggatatgcttttctccttcaaagagcactcctttataagtaagctggagattttttcgcgtgtttttctgttcgtcaataaaataaaaattctcttttgattgcgccagtctgagccttcttttcgggtttgcgtagaatttgacgcccatgtaaataaaataaataagaagtgcaagcaagacaatcctcaatactgtaatggccatatgtgtgaaggcacctcctcacctttgtcatgatctgatgtaatacgaaaaacaaaacaaaaggtttcattttttaagaagaaatagataaaaacatttacccgtttttcaggcgaattaatcgtatgcttcagcattggttttgtataataagaagggtagtgaaaaaaaggaggtttattgatgacaaaattagatgaaaagctcaccatgctgaaagcgttaacggatgcaaaagggataccgggaaatgagagagaagtaagacaagtgatgaaatcatacatagaaccatttgctgatgatgtcacaacagaccggctgggaagcttaatcgccaaaaaaacgggcaaagaaaacggtccgaaaatcatgatctcagggcatttagatgaagtcggttttatggtgacgcaaatcactgataaaggctttctccgctttcaaaccgtcggcggctggtggtctcaggtcatgctggcccagcgcgtcaccgtcgtgacaaaaaaaggggacatcacggggatcatcggttcgaaaccgcctcacattctgcctcctgacgccagaaaaaaagccgccgatattaaagagatgttcatcgatatcggggcgtccagccgtgaagaagcaatggaatggggcgttcttccgggtgaccagattgtgccgtattttgaatttacagtgatgaacaatgaaaaacatttattggcgaaagcatgggacaaccgtatcggctgtgcgattgccatcgatgtattaaaaaaactgaaaaacagcgatcatccgaatgaagtatacggggtcggaacggttcaggaagaagtcgggctgcgcggggcgaaaacagcggcacatacgatccagcctgatatcgcgttcggtgtggatgtcggaattgccggagatacaccgggaatttccgaaaaagaggcgcaaagcaaaatcggcgaagggccgcaaattattctgtatgacgcgtcaatggtatctcacaaagggctgcgcgaccttgtcgtgaacacggcggaagaagcgggaattccgtatcaattcgattccattgccggagggggcacggattcaggttccattcatttaaccgcaaacggagtgccggcgctgtccattacgatcgcgacgcgctacattcacactcatgccgctattttgcatcgggatgattatgagaatacggtaaaattgatcacagaagtgattaaaaaattagaccgggaaacagttgaccgtattacttatcaataaagatacggaagaatctgcttttttaagcagattcttttttttgtctgtacaaatatgaaccctgcgtctacaataagagaagacatagcaaaaatctgacaacatgtttttgaaagcgctttaaaaaagggagggtttacaaatgaaaaacagattcagacgcatgatccgcttttcatgcgcagccgttacagccggtctgctgctgatgtcttcatctccggcatctgccgcgttttggggggcatcaaatgaattgctacacgatccgacaatggcgaaggaaggaaacacgtggtacgctttcggaaccggtttggaaggggagagggggcttcgcgtcttaaaggcgggcagcggcggcgtatggaccgttcagaaatcaatctttacttccccgctgtcatggtggggcaattatgtgccgaattacgggctgaatcaatgggcccccgatgttcaatattttaacggaaagtattggctgtattatgccgtttcttcattcggcaaaaatacctccgcgatcggtcttgcatcatctacaagcctcagttcgggaaactggaaggacgaagggctcgtcatccgttcaacaagcgccaataactacaatgcaattgatccggagctgacaattgataaagacggaaacccttggcttgccttcggttctttttggagcggcattaagctgacaaagcttgataaaaatacaatgaaaccgacgggatcactttattccatcgctgccagaccgaataacggcggagctttggaagcgccggccatcacctaccagaacggctactattacttaatggtgtcgtttgataaatgctgttcaggcgtgaatagtacgtacaaaatcgcttatggaagatccaaaagcatcaccggcccatatctcgataaaagcgggaaaagcatgtcagaaggcggagggacgattcttgactccggcaatgaccgctggaaaggcccgggcggtcaagacattgtgaacgggaatattttagtgcgtcatgcgtatgatgccgaaaacagcggaattccgaagatgctcatcaatgatatcgattggagttcaggctggccttcctattaattgatcagccgggcatgtgtgtccggcttttttacttgcaataaaagattgacagtttgattcctccttaactataataaaattgttcgtacaaataaaaggatagaagttttgttatttatattcgtacgtatatttttaagaatgcaagcgctttattttgataggaaggggaaatgaatgtgcttcagaacaaagaatatgaattttggtttgtaacgggaagccagcacttatacggagaggaaacgctgcagcttgtcgataaacacgcaaagggaatatgtgacggcctcagcggggtgtcatcaagatacaagatcaggcataaaccggttgtcacgtcatctgaaacgatcagagaggttttgcgggaagcgcagtatcaagaaaactgtgccggggtcgtgacgtggatgcatacattttcccctgcgaaaatgtggattgaaggtctttccgcttttcaaaagccgatgcttcatctgcatacccaatatcaccgagacatcccgtgggaaacgattgatatggactttatgaacagcaaccaatccgctcacggagaccgggaatacgggtatatccagtcaagaatggggcagacgagaaaagtcatcgcaggctattgggatgatgaggaagtcaaacatgacatttcgcaatggatgaacactgctgccgcttggaatgaaagcaggaatattaaagtagcccggttcggcgacaatatgcggaatgtggcggttactgacggagacaaagtcggcgcccacatccaattcggttggcaggttgacgggtacggaatcggcgatcttaccgaggtgatgaacaacgtcaccggcgcagaaattgaggcgctttatgaggaatacgacaaattgtatgtcatcagcggcgaaacaaaacgggatgaagcaaaagttgcttccattaaagaacaggcgaaaattgaactcggattaacggcctttctcgaacggggcggatatacagcgttttcgacctcctttgaagttttgcacggaatgaagcagcttccgggtcttgccgttcagcgtctcatggagaaaggttacggatttgccggcgaaggcgattggaaaacggctgcccttgtgcgaatgatgaaaataatggcggacggagaacaaacctccttcatggaagattatacgtaccattttgaaccggggcgtgcgatgattctcggatcacatatgcttgaagtatgtccgacgatcgcccttgatcagccgaaaatcgaagtccatcctctctcaatcggagggaaggaagatccggcccggttggtctttaacggaatcggcggttcagccatcatcgccagcatcattgatatcggcgggcgattccgtctcattctgaatgaagcggaaggcagggaaattgatcatgatatgccgaatctccctgtggcgcgggtgctgtggaagccggagccatcgctgaaaacagctgcagaagcatggattttggcgggaggcgcccaccatacttgtatgtccttccggcttacggctgaacagatgcttgactgggctgagatggcaggcattgaaagcatctttatttcccgcaataccgaaatacatgagctgaaaaaagagctgaaatggaatgacgtattataccggctgggagggaattgatatggcgtatacgattggtgttgatttcggcacattgtccggccgggcggtgcttgtcaatgtccgcacgggcgaagaaatcgcgtctgcggtaaaagaatatactcatgccgtcatcgaccgcacgctgccgaagacgggtgaaaaactccctcgggactgggcgcttcagcatcctgccgattatatcgaagttctggaaacggcgattccgaacctgcttcaagaggcgggcgctgatccaaaagacgtgatcggcataggaattgattttaccgcctgcacgattttgccgatagacggcgcggggcagccgctttgtatgctgccggaatttgaacgggagcctcatagttatgtgaagctgtggaagcatcatgcggctcaaaaacatgcagaccgtttgaacacgattgccgaagacacaaaagaaacattccttaaaagatacggcggtaaaatttcttctgaatggatgatcccgaaaatcatgcaaatcgcggaagaagcgccgcatatatacaaggcggcagatcggattgtggaagcggcagactggatcgtctatcaattgtgcggttcattgaagcgaagcaactgcacggccggctacaaagcaatctggaatgaggagacggggtatccgccggatcatttttttgaaaagctcaacccgttaatgaaaacgattacaaaagataaattaagcggcaccatttattcagtcggggaaaaggcaggaggtttgaccgaaaaaatggcggagctgaccgggcttctgccggggacggccgttgccgtcgccaatgtcgacgcccacgtgtcagtgcccgcggtcggtattacagagccggggaaaatgctgatgattatgggaacgtctacctgccatgtgctgctcggcgaggaagaacatatcgtccccggtatgtgcggggtcgtcaataacggcatcttgcccggatatgcgggatatgaagcgggacagtcctgtgtcggcgaccactttgaatggttcgtcaaaacgtgcgttccgagagactatgagaaggaagctgaggataaacacatagacattcacgagctgctcagcaaaaaagcagctgaacttgttccgggggaaagcggccttctcgcgcttgactggtggaacggaaaccggtcaaccttggtggacgccgatttgacgggcatgatgctcggcatgacgctgcacacgaagccggaagaaatctacagggcattgattgaagcgacggcgttcggaacgaggatgattatcgaaacgtttcgggaaaacggcgttccggtcgaggagctttacgcagccggaggaatcgccgaaaaaaatccgtttgtcatgcagatttatgcagacgtcacaaatatggacattcaattatccgggtctccgcaggcgccggcactgggctccgcgattttcggagcgctcgccgcgggacgggaaaacgggggatactccaatattgctgaagcatgtgcgcatatggggaaattaaaagacggctcttatgtcccggatcgaaaaagagctgagatttatgacagcttatatgcggaatataaagagctcgttcactacttcggcaaagaaaacaatgtcatgaaacgcctgaaagccattaaaaaccgtgattttgcgaaagggggaagccgccatgcttgaagcgttaaaagaagaagtgctcgctgccaatctgaagcttgaggaacataaccttgtcacgtttacatgggggaatgtcagcggcattgacagagagagcgggagaatcgtcattaaaccgagcggtgtcgattacagtgagctgaccgctgacaaactggtcgtcctgaatgaggacggagacattctcgaaggctcgctgaaaccgtcttctgacacgccgacccatctttatctgtataaagcgtttccgtctatcggtggaatcgttcatacgcactcccgctgggcgacgagctgggcacagtccggaagagacatacccgctctcggaacgactcacgcggattactttgaaagcgctataccctgcacgagggaaatgtatgaagaagaaattgtgaaagattacgaatatcatacaggcaaagtcatagccgaaacttttcaaaacgaaccgtatgaacaaaacccgggtgtcctcgtccacagccacggcccgttctgctggggaacggacgcgctgaatgccctgcataacgccgttgtgctcgaaacggtagcggaaatggcctaccattctcttatgctgaacaaacagctcagtccgatcgacagagtgctgcatgataagcatttttacagaaaacacggggcgaatgcttattatggccaaacttgacgcagccgggtttctgattgatttagacggaaccgtattcagggggcgggagctgattgacggcgcaaaagaagccgttcatacccttcagtcactgggcaaagccgttgtctttttaagcaaccgcggcaatctatcaagagcaatgtgccgaaagaaactgctgggtgccggtatccgcacggatgaacggagcatcgtgctgtcctccagtgtgacggcatcatttttaaagaagcattatcctttgtcaaaggcgtgggtgttaggagaaaaagggctgactgatgaactcgctttagcgggtgtcgccctggcgcaaaacccgcaggcggcagactggcttgtcatctccctgcatgaaaccgtcacctatgaggatctgaatctcgcttttaaggcggcttcctccggcgcgcgcatcatcgccacgaaccgggaccgctcctttccgaatgaaggcggccatgccatggatgtcgcgggaatgatcggggccattgaagcatccgccggagcaaaaacggagcttgtcatcggcaaaccgtcttggctgatggctgaggcggcatgtgaagcgctcggacttccctctgaggaatgcgccattatcggagacagcctcgaatcagatatcgcaatgggcagcctgtacgggatgaaaagcgtattggttctgacggggtcggccaaacttggggagccccgtctatatgaacctgacatcgtccttgattctattaaagacctgacagaattagcgaaggagggaacccttttatgaaacgttctcctgaggacattcaatccgagtttgacaaggaaggggccagccgctcaccgattcaaatagaagatatcgtgatcggggcgaatgcaaaagaagagcttctcagatttctgcaaaaaaaatgctggaatcatccggtcatcgtctgtgaccggaacacgtacgaggcggcggggcgtctgcttgcggacgaattgagggcaggcgggatcaaagcgtcaaaagtcattattccggagcatgaagccggggccgccgcggctgatgagaggacattggtctatacgctgatcaatctcgcggaagagacggatgtcatcattgcggccggtgcaggaacgattcacgacattacgcggtttgccgcctgccagcgcggattgccgtttatctcattccccaccgctccgtcagtcgacggttttacgtcggcgggagcgccgctcatattaaacggaatcaaaacgacgattcaaacgaaagcgccgatcgccttatttgcggatacgaatgtattaaaagaagcgccccgttcaatgacagccgcgggcttcggagacatgctcggaaaaataacatcgctggcagattgggagatttcccgcaggcttgcgggtgagccgtactcagaagccggggcgaagcttgtgaaagacgcgctttggcagtgcattgatcaccgcgctgacattgccatgggaacggaggccggcattcagatgctgatggaagcgctgatcgtttcgggtcttgtcatgcttgcgcttgaccactcccgccccgcctcaggaggagaacatcacatctcgcattggattgagatggaaatgctgaaggcaaaacagcctccgattctccacggtgcgaaggttggctgtgcgtgcgcggtgctgagtgatatttacaaagaactggcttgtcacgaaaagcttgctgaactgccgccgcactttcgcgaggcgattcaatctgcatatgaagggcttcccgacggcaagacaattgccgggtggctcgcatctgcgggaggtcccgcctgtttcgatgagatcggtgtaaaacaggaccttgtcagcgatgcgcttaagcatgcgcacacactgcgagaccgttataccggtttaaccatcataaatgaaaatgcagcgctctttgcacatcatttgcatcaatagccgcacggcctaaagtggaaggggtaatgacatgaaaaaaacgaccgctgtatgtttggtgctgatgatgctcttcttgtttaccgccggctgttcacaagaacggactgccggccggccgggagaaacagagctgacgttttggacatttaacggtctgcacgaacagttttatcaggaaatggtcaaagaatggaatcagaaatatccggatcgcaaaatcaagctgaataccgttgtttatccttatggacaaatgcatgataatttatcggtttcactgatcgcgggtgaggggcttcccgatatagcagacgtggaattaagccggttctcgaactttctgaagggtaaggatatcccgcttgccgatctgacgccgctgattgaaaaagaccgcgataagtttgtggaagcgcgtctggccttatacagcaaaaacggaaaattgtacggccttgatacacatgtggggacgaccgtcatgttttacaacatggatatcatgaaaaaagcgggcgttgatcccgcctccattaaaacatgggaagattaccggcgggcagggaaaaaagtgcgtgaagccgctgggaaaccgatgggaacggttgaaacaaacgactccgccacatttctatccatgatttcgcagcaagggtcaggctactacagcaaaaacggaaaattgattctgaacagcaagacgaatacagacacactgaattatgtaaaggacatggtaaatgataaaacccttctgccggctcccggcggcggccatcacagcgaagaatactacggttttatgaatcagggcggggcagcctcagtgctgatgcccatttggtacatgggacggtttatcgattatatgcctgatttaaaaggaaaaatggcgatttaccctatgccggcctggaaagaaggcggtgacagatcagcgggtttaggcggaacagccaccgtcgtgccgaagcaggctgaacatctgaagctcgcgaaagaatttctcggttttgcgaaaggttcgaaggaagggaatataaagctttggacggtgctcggctttgacccgctccgctgggacgtgtgggattcaaaagaattgaaggagaaaaacaagtacacggatttcttccggaacggtacgtcaattttttcctcgctccttgaaataaaagatgagatcaatccgatttatctgcatgaagacttctctaaagcggctgatctcgttgtcagacaagtgctgttcgatgcgctgaagacgcaggaaaaaacacctaaggaagccttggacgaggcggcagagcaattagagaaataggagaagccgccctatttaacagtgaaagcgggggagcttttatgagacctgtaaagacagagacagcgcaaaccgtttctgcagtccggaagaagccgcgccggtgcaatgtgctgtattcaaaaaaagcggcgccttatctttttacggcgccatttatcatttcgtttctcgttttctttttgtatccgattatcagcgtgtttatcatgagctttcaacggatactgccgggagaaattacatttgtcgggttttccaattataccgctcttcttaatccaaccttttatacggcattatttaacacattggaatataccttctggacgctgatcgtgctgattccggtgccgcttcttttggcggtgattctgaattcgaagctcgtcaggttcagaaatgtgtttaaatcggctctgtttgtaccggctttaacatcgacgatcgtagcggggattattttccgtctgatgttcggagaaatgaatacgtcgcttgcaaacgagctgatgatgaagcttggcgcatcaccccaaaactggctcaacaacaaaggtaccggcatgtttttaatggtactgcttgcgtcatggaggtggatggggattaacattctttactttctggcgggattgcaaaacgtgccgaaagaattgtatgaagcggctgaaattgacggggcgagtacgtggaaaaagttccggcatattacccttccatttttaaagccggtgtccgtttatgtgttaacgatcagtattatcggcggtttcagaatgtttgaggaaagctatgtgctttggcagaataattccccgggcaatatcggcctcacgcttgtcggttatttatatcagcaggggcttgcatacaacgaaatggggtacggggccgcaatcggaattgtccttttgcttgtcatcttactagtcagtcttgtttcactgaaactgtccggttcgtttaaaggggagggataagcggtgcgtaacaatcacatgttttccgtgtacagagtcgcgtttaccttgttttttatcatgctgagcctgttgtatatctttccgatgatctgcctattgctcggttctttaaagccgtcatctgagctgatgcgcatcgggctgaatctgcgccttgatccggatgtgatgagccttgataactacacctatttgttcaacggggggagcatttatttcaaatggttttttaacagcctgcttctcggcgttctcaccacggttctcacgctgtttttttcctctttgatcggctacggactcggtgtctacgaatttaaaggcagaaatattattttcgttcttgtgctgatcattatgatggtgcctcttgaagtgatgatgctcccgttgttcaaattgacggtgggtcttcatttgatcgattcttatacgggagtgattctgccgtttattgtgtcacctgtcgccgtgttctttttccggcaatatgcgctcggacttccgaaggatctgcttgattcagcgagaatggacggctgcaccgaattcggcatttttttcagaattatggcgccgctcatgaaaccggcattcggggcaatgatcattcttcaatctttaaacagctggaataactttttatggccgctgatcgtgcttcggtcgaaagaaatgtttacgcttccaatcggactttcagggctgctgagtccgtacggcaacaactatgacatgctgatttccgggtccgtttttgcgatactgccggtgatcatcatattcttgtttttccaaaaatacttcatttccggactcacagtaggcggagtgaagggatagagagagggaggaaatataatgaaaaaagcggggattacagcagataaagaatatatcatcggtgaagtggacaaacggatgtacggatcatttatagaacatatgggccgggcggtgtatgaaggcatttatgagcccggacacccgaaagccgacaaggacggcttcagaacagacgtgcaggagttaatcaaggaattgcaagtgccgttcatccgctatccgggagggaattttctctcgggctacaattgggaagacggcgtcgggccggtgaaggaccgcccgcggaggctagatttggcatggcaggcgacagaaacgaacgaagtagggacgaatgaatttttaacgtgggcgaaaaaagtgaacgccgaagtgaatatggcggtcaatctcgggacgagagggatcgatgccgcccggaacctcgtcgaatactgcaaccatcctgaagggtcatactggagcgacttacgaaaatcgcacggatatgaaaaaccttacggcatcaaaacatggtgcttaggaaatgagatggacggcccttggcagatcggtcataaaacggcgcatgaatacggacggctcgccgctgaaacggcaaaggtgatgaaatggacggacccgacgatcgaattggtggcttgcggaagctcaaacagcggcatgccgtccttcattgagtgggaggccgaggtgcttgagcatacgtatgagcatgtggattacatctcactgcatacgtattacggcaaccatgaaaatgatcttgagaactatttggcgaagtcgatggatttagaccattttattaaatccgtcacagccgtatgtgattatatgaaagcgaaaaaacgcagcaaaaaaacgattcacctttctttagatgaatggaatgtgtggtatcactcaaatgaagcggataaaaaagtggagccatggattacggcccggccgattctcgaagacatctacaattttgaagatgcgctgttgatcggttcactgctgattacgatgctgcagcatgcggacagactaaagatcgcctgtctcgcccagcttgtcaacgtaattgcgcctattatgactgaaaagggcggagaagcatggagacagccgatcttttacccttacatgcacgcctctgtctacgggagagggacttcaatgaagctgctgatcacctccccgaaatacgactcagcggattttacggatgtgccgtatgttgatgccgcggccgtttaccatgaagaggatgaagcactgaccatttttgccgtcaacaaaagcaaggaactgatggaaacggagatcaaactgagagggtttgaagattaccgcatcattgagcatatcgtgctggagcatcaggatatgaaagcgaccaatcaaaaaaacagaaatgaagtcacgcctcactccaacgggacgtcttccgcaaacgccgaaggaataacggctcattttaagccgctgtcctggaatgtcatccgtttatcaggaaaatagcgttccgaaaagccgggctgcgccgccggcttttttttacgcaaaaatcatctactgttatctgataattgtgataatatttagaaaaagagaaaaggggctgggattaaatgaatgcgattacaatcgtcatagcgtctatatgtattctggcgatcgcctatcggctttacggtacctttatgatggtcaaagtattaaaaatcaatgatcagacaccgactccggcccatgtgcttgaggatgggaaagattatgtgccgacgaataagtgggtgtcattcggccaccacttcgcggcaatcgccgctgccggcccgcttgtcggaccgattctggcagctcagttcggctatctgcccgggcttttatggctgttaatcggggcggtgatcggaggagccgtgcacgatattgtcgtattgtttgcatcaatgcggaaaaacgggaaaacgctttctgaagtcgccaaagaagagcttggcccggtggcgggcttttgcacgggtctttccatgctgtttatcattacgatcacgatggcggggctgtccatggttgtgctgcacgcgcttgagaaaaacccgtggggaacgtttgcggtggggattacgattccgatcgcgatgggggtcggcgtctactataaaaaaacgggcaatctcaaactcgcatcaactgtcgggtttcttttgttaatggccggtgttgtcatcgggccgcggctgcagacaacggctctcggggacatgctgacactggatgcgaaaacgcttgcagtggcgcttcctgtttatgcgtttttcgccgcggcgcttccggtttggcttttgctggctccgcgtgactatttaagcagttttatgaaaatcggggtttttgccgctttgatcgcaggcgtctttttcgtcaatcccgccattaaatttccggccgtaacggagtttattcacggcggagggccggtgatcgcgggtcctgtctggccgtttatttcaataacgattgcctgcggcgccatttcgggctttcatgcatttgtcggttccggcacaacgccgaaaatgctggataaatggagtgatataaagccggttgctttcggagcaatgcttgtggaatgtctcgttggaattatggcgctcattgcagctgccgctcttgagcccgccgactattttgctataaacagcacgcctgaaatattccgcaccctcgggatgaatgtcgtccatctgcctgaattgagtaaagaaatcgggctcagtctggaaggaagaacgggcggcgctgttacgcttgccgtcggaatgacgtatatctttacggagattccgtttttcagtcatttggcttcatacttttttcaattcgtcattatgtttgaagcggtgtttattttaacggcgattgatgcgggaacccgtgtcgcccggtacttgattcaagagtttttcggagaggtctataagccgctgaaaaaaacagactggctgccgggctcgattttctcaagcgcgctcgcctgcctgctgtggggctatcttctgtattcgggcgacatcagctccatttgggcgctgttcggcgtatccaatcagcttatggcgtctgtcggcttaattatcggtgcgaccgtcgtattaaaaatagccgataagcggcgctatatgctgacatgcctgattcctctcgcttatttgtacgtgaccgtcaactatgcgggttattggatggtgcggtatgtgtatttgaaccccgaagcggcgggatacaacgtgctgaatggcgttttatccattatcatgctcattctcgggcttgtgattatcattgcggctgtgaaaaaatgggcgaatgtatggcgtgatccgagtgccagactggaagcttcaatacccggataaatccgcggccgtccgaacattgcagcatcataaaaaagcagagagccgatcggtctctctgctttcatcttatgacaaatccgccgcttccaaaaggtaatccgccaaatgaaccgcgcggacacggcctgttaatccttcgcgtaaaatgccgagctgcatttgcagaaggcatccgggattggctgtcacgatgacggccgcctccgtttttccggcggctttcatcttactgtctaatattttcatagacatctctgactctgttatattataaattcccgccgacccgcagcagctgtcggccttttccatttctctgtactcagcccctttaatgcttttcaaaagcgtgcgcggttcctctgacgtatgcatcacattgcggagatggcaggagtcctgatatgtgacgatatgaggagactgcgcccgcaggtttttttgatggaacttcagatcaaccagtacggatgaaaagtctttgagcttccgggcgaattgttcggcacgttccgcccatccaggttcatctttcagtaaatgcggatattcctgaagaaaggcgccgcatccgccggcgtttgtaatgatataatcagcgtcaagcgcctcaaaagccgcgatattccgcttggccagttcttttcccatctctttttctccgctgtgcccgtgaagcgcgccgcagcacgcctggccgtccgggaccgcgatttcacacccggccgcctgtaaaagcgccgttgtcgcatgatttgtcgctaaaaacatcgtatccattaagcagcccgagaaaaaagcggcccgtttttggacgggacccgcggcaggaagaaaacgcggcctttccttcatgtctttccgtttcggggcgggcgggagcacttgttccattgtgcgcagatgttcaggcaaaacgcgcagcataccggtttttctgacggcggtctgcagtcccgatctttggtatattccgagaagattcacggctgtctgcatgcggttttggtgagggaaaagcccggtgaaggcggctttccgcaagagacgcacgcccggcttatgttttttattttgatgaatgatatccctcgcttcttcaagcagctgtccgtaattgacccctgccggacaaacgggctcgcatgcccggcatccgagacacagcgaaagtgagcgctcgacatcttcatccggctcgatcagtccgtctgtgacggctttcatcagggcgatccggccgcgcggcgaatgggattcttgaaatcccgattcaatataggtcggacaggaaggaaggcagaagccgcagcgcatacagttcagcaattcaccttcatccatgcggtttttgaattctgtttgaatttgttgctgctctttagccgttgtcatttcatcaccaccacgcgtttccttgatgaattggcgaatatttttcccggattcagcagattttggggatcaagcgcttgtttgatcgctttcatggcggtgatgccttctgttttcagcttcatttctaaatacggcgcttttacgatgccgaccccgtgttcacccgttatcgtcccgcccagctcaatcgctctttcaaaaatggcggcaaaagctttttcgacacgttccatctcctctgtatttcggatatcggtggtgcatgtcggatggaggttgccgtctccggcatggccgaatgtgcagatggacaggccgtatgtttctgcaatctcgttaatggctttgaccatgctggcaatttgtgatctcggcacggtcgcatcttccagaatcgttgtcggtttcagccgggcaagggctgataatgcggaccgtctggcctctgtaagcgcgaatgcctcttcctcggtttcagccgtttggacggatacggcggctccgtttttacaaatcgcttcgattttttccatatctcgtctgaccgtttcggtgtcaccgtcctgttcgatcagcagcaccgcttttgcgtcggtcggaagcccgatcttggcgtaatcttcaatgacctgcagtgtcggctgatccagaaattcgagtgtcgccggaatgattttttcagcgatgatggcagaaaccgattccgcagccgcttcaatatgttcatagagtgcaagcagcgtttttttcgtttccggcttcggaaccagctttaaagtcgcttccgtcacaacgccgagcgtcccttctgatccgacgaaaagccgggtcagatcataaccggcgacatcctttgtcagctttcctcctgtgcggatgatatcgcctgaagccaatacggcttcaaggccgaggacataatcccgggtgacgccgtacttcaaaccgcgcagcccgccggaattttcattaatattcccgccgattgtcgatattttcatgctgctcggatcaggcggataaaataaacctttttgttcaaccgcacggatcatatcttgcgtaatcacgcccggctggacggttgccgtcaaattttcttcatcgatttctagaatgcggttcatatgtttgaataaaagcacaagcccgccttcagacggacatgtgccgccgcacaagtttgtgcctgaacccctcggcacgatcggaatgtcatgcctgctgcaaatcgttaatatacgggacacgtcattcgcactgcggggggcgattaccgcatccggcatggcttgcagctgaggagccgcatcataagaatacacaagacggcccgccgccgaatcatcataattctccttcccgaccgtccggatgaacgcttcttttgcctctcgtgaaatcatgttctcccaacctccctgataagaaaagcgttttcatttaattgtaaagaaaaacgattccgcacactatggagaaacatatgaaaaatgttgatatgattacgtgctttttgtatgttgatctaaaaagcgcagcgccaaataaaaagccgctatgtcttcagggcggtccagcttcatatttgtcagtgattccagtttggaaagacggtagcgcaatgtgttgatatgaatatgcatgtcgtcggcggtgcgctttaacgataattgccggtcgaaaaaggcgcgcagcgtatccagaagttcttcccggccgagtacatgctcgagaacccgccgtgaaaattccgacctcgtgcggggtgtgatatcggcaagacacatatccagttttaaatcttcttcaaagacggcctgcttgtcaccgattccggctgaaagtgctttatctgcctgttcgtatgattccgtgaggcgctctcccggaacgatccgtccgatgccggcggtgacaggctgcccaaaaacggcgccgatctttttaatgagctgtgttttggaagccgaatttgcttcatgattaatgagaatgcgttcatttccccagcggacaaacaggtcttcagggcattcgtactgccagagccgcccgagctcctccgctttatattgctcataacggccttgaatgagtatgatccggcggtatgcatgaaggtctgcgccgatgagctttgctttttctaaaaagcccggagaccattctttcagctgcagccaatcaaccataaaggattcaagcattctcgcacgccactgcgcttcttccatatggcgcgtttctttaataaacagctccgtcatttttctgagcaattctccgaaaggcaggatatcgtcagggtctcctgtcaggccgaatactccgatcacttcatggcctgaaaaaacggggaggttcagtcctgcttttacgccctcgagccgtttttcatcttctttcgtaatgatgacattccgtttttcgcgcgcgcagatcagtgcgccttcatgaaaccatccggcgcgcgcctcgttggtgcccgcgatgatcatcccttttgtatcggcaataatcacttcgcggctgtacatatgtttgacttcggcaatcaatttctttgccagttccggctgtaactgcatggcgatccccctcgccattattatacaaaaaaaaccgggtgtcccatcacccggttcatgcttattgcgcaggttttaatccgccttcaagtgttttgagcatttcatttttttctgagtccgacgcatgctgccaaagaacttcgaataagacgccgaggcccggaagcattttttcttcaccgctttggatggcgtcaacgatcgtatgctccagctgatcctggttattgccggttacattggcaataacggcgttgcgtaaattaagatccattacaaccgctcctttttctgaatgtgatacgcatattcttaccgcgcacgcggtttattatgtgctgttcttaagatataataacaacatgcatgaaaaaaggagagcacagacataaagtgaaacgaatcgactctgcaaaaaaccaaaaagtgaaggactggaaaaaacttcacacaaaaaaagagagacttaaaacgaatacatttctgatagaaggagagcatctggcagaagaagcgctcaaatcaaagggaacggtaaaagaaattctcgtaaacgatgagagcgccatcccggccgatctggacatgagcattccgtgctacgtgctgagcgaagacgcgttttcagccgtgacggaaacagaaacgccgcagcggatcgccgcggtctgccatatgccggataggcagcctgatcagctgaagcggctgcttctgattgatgccgtgcaggatccggggaatttaggaacaatgatcagaacggcagatgcggcgggaatcgacgccgttgtccttggtgagggaacagcagacccgtacaatggaaaaacgctgcgttcagcacaaggttctcattttcatattcccattttgaaacgtccgcttgatgagtttaccgttgagctgaaatcacaaggcgtcgcgatctacggcacggcgcttgaaaacggtgcggcttatcaaagtgtgaagcctgaagaatcgttcgcgttaatcgtcgggaacgagggggcgggagtggacgccggccttctgcaaaaaacggatctcaacctgtacgttccgctgtacgggcaggcggaatcgctgaatgtggcggtagcggccgccatcctcgtttatcatctcagaggataggttgcgaaaagccttggatttcactataatagatagcaataatgtaaaaaccgtgacagaggacgtcaatttttgcacacactgccttccagggagaaaatgccgctgactgaaagcatttttatcgcagcacaaaaattgattttcacctctcgagttgtcaccgggaccgcgccaaacgcgcgtaaaggtgaaccggaacgatcgtttccgttatgtcaatgaagctgtcggcagatgaagtctgccttaaaaagggtggtaccgcggccacaactcgtcccttctctcaaggggcgggtttttttgttttctgaaaaaggcatagaacggtttggtttacataaaaggaggatgcatgatggaagagaagcttaaacagctcgaactggaagctgcagaaaaagtagaagcggcgggttcattaaaagaagttaacgacattcgggtgcaatatctcggaaaaaaagggccgattacagaagttctccgcggcatgggcaaactgtccgccgaagagcgcccgaaaatgggagcgctcgccaatgaagtgagagagcgcattgcagcagccattacggcgaaaaatgaacagcttgaacaagaagagatgaataaaaaactcagcagccagacgattgacgtcacattgccgggcagtcaggtaaacatcggcggacgccatccgctgacggtcgttattgaagaaattgaagatttatttatcggcatgggatataccgtcgaagaaggccctgaagtggaaacggattattacaactttgaggcgctgaacctgccgaaggaacatcctgcccgcgacatgcaggacagcttttacattacagaagaaatgctgatgagaacgcagacgtcaccggtgcagacgcgcacgatggaaaagcataaaggaaaaggccctgtcaaaatcatttgtcccggtaaagtgtatcgccgcgacaacgatgacgcgacacattcccatcagttcatgcagatcgagggtctcgtcgtcgaccgcaaaatcagcatgagcgacctgaaaggcacgcttgaattggtcgccaaaaaaatgttcggccaagaccgtgaaatcaggctccgtccgagctttttcccattcacagagccttctgtcgaggtggatgtgacctgctttaagtgcggcggacaaggctgctccgtctgcaaaaaaacaggctggatcgaaattctcggcgccggcatggttcacccgaacgtgctgaagatggctggattcaatcctgaggaataccagggtttcgctttcggaatgggtgttgaacgtatcgcgatgctgaagtacggcattgaagatatccgccatttctataccaatgatgtcagattcatttcgcagtttaaacaggcgtaagaggaggatacacatgtttgtttcttataaatggttagaagattacgttgacttgcagggaatcgatccggccgtgcttgcagaaaaaattacgagagccggtattgaagttgagggtatcgagtataaaggggagggcgtaaaaggcgttgtcatcggacacgtgcttgagcgcgaacagcacccgaatgccgacaaactcaacaaatgccttgttgatatcggtgcggaggaacccgtgcagattatctgcggcgccccgaatgttgagaaaggacagaaggttgccgttgcaacggtcggagccgtgcttcccggcaatttcaaaattaaaaaagccaagctgcgcggcgaagcgtctcacggcatgatctgttcccttcaggagctcggcattgaaagcaagctcgtggcgaaagaatatgcggaaggcattttcgtttttccgaatgatgctgaaacgggagctgacgcaatggcggcccttcagcttgatgatgcgattttagaattgggtttaacgccgaaccgcgccgacgcgatgaacatgctaggcgtggcttatgaagttgcggctatcctcggcgcagaggtaaagcttccggaggcttcatatgaaaaagcggcaggaaaagcggcggatgctgtttccgttaaggttgaagatacgcaggccaatccgcattatgccgcaaaaatcattaaaaacgtcaaaatcggcccgtcaccgctttggatgcagacgaagctgatgaatgcaggcatccgcccgcataacaacgtcgtggacattacaaacttcgtcctccttgagtacggacagccgcttcacgctttcgattacgaccggttcggttcaaaagaggtcgtcgtcagaaaagcggcggaaaacgaaaccatcgtaacgctggatgaacaagagcgaaagctgtcaagcagccatttggtcatcacaaacggaaaaaaagcgcaagccgttgcgggagtcatgggcggagctgagtctgaagtccgtgaagacaccactgcgattttactggaggccgcttatttcgacggacagaccgtccgcaaagcgtcgagagacctcggattgagaagcgaagcgagcgccagatatgaaaaaggcattgatccggcccgcgttttgctggcggctgaacgggcctgcagtctcattcaggcatatgccggcggagaagtgctctcaggcacggttgaagaaaaccatctgaaaattgaagcaaacaatattcacgtgtctgttgaaaaagtgaacgccgtgctcggcatgacaatcgctaaagaagaaatcatcagcatttacaagcgcctcgggtttgcagtcggtgaagctgaagacgttctcgtcgtaacggtgccgtcgcgccggggagatattagaatagaagaagacctgattgaagaagcggcgagattgtacgggtatgacaatattccgtccacgcttccggaaacggccggcacgacaggcggcttgacaccgtatcaggcaaaacgccggaaagtgagacgtttccttgaaggagcgggtctttcacaagcgaccacttattcattaacgaatgataaaaaagcggccgcttttgcgatcgaaaaatcattcaacacgatgcttgctctgccgatgagcgaagaaagaagcattctcagacacagcctcgtgccgaatcttcttgaagccgtttcatacaatctggccagacagactgattccgttgctttatatgaaacgggttctgtatttctgacgaaagaagaaaacacaaaaccgattgaaaaagaacgggttgccggagctgtaaccggattgtggcgcaaaaatttatggcagggtgagaaaaagccggttgatttcttcgtcgccaaaggaatcgttgaaggcctgctgcatcaattgaatgtgtcagaccgggttgaatttgtccagtcagaacgcaaaaacatgcatcccggccggacggcaaacattctattgaacggttcgcttgccggatttatcggccaggtgcatccggcaatggaaaaagagctggatatcaaagaaacgtatgtgttcgagcttgatctgcacgcgcttctgaccgaggaaacagaacctgtcgtgtatacgccgattccgaagtacccgtccgtcacgcgcgatattgcgcttgtggcagataaaaccgttacaagcggacagcttgaagccgtgatcaaagaagccggcggcgcgctgctgaaagaagtcaccgtgtttgatgtgtacgaaggtgagcatatggaagaaggcaaaaaatccgtcgccttctcgctccaatatgttaaccctgaacaaacattgacagaagaagaagtgacaaaagttcatgaaaacgtgctgaaagcgctggaagaaacgtatcaggccgtattaagaggataaagaaaaagcttgcagatcactctgcaagcttttttattatgaccgcttccgttcaacaaggcgtttcgctttttgcgtattggcaaaatgaagtttggtgaacgttctgagcgcaccttctcccttattgatgatcagcttggcggcagcttcatcgacatgcggccccgcgcctttcggaatcgtcatcccagcctcacgggaaagcttatccatttcaattaagaaagaatatcgcgcaatgatagaggctgcggcgacggaaagatgtatgctttccgctttcgtgctgaaaaacgttttttcttttacgatatcccgtccggaaagatgcttaaaataaatgccgggctctgcgaattggtcaatcagaatcgcttccggtttaacgccgttcatttttctcagcagattggaaatcgcctgattatgaaggagcgccttcatttttccttggctcatgcctttttcctgcatctgattgtatttttcgttttttaacacaagcaggctgtaaggaatggttttaattaacagtttggcgatttcaataatctgcggatcttttaaatccttcgaatccttcacaccgagttctttcattaaagaaagctttgatttgtcggcgtaagcgcaggcaaccgttatcggcccgaagtaatcgcctgttccgacttcatcagagccgatcactgacatggaggcaatgcccgccgggggagcgtagagcgggtcggccgcttttttgacggttttctttgctttcggcgcctcagccgttccccagcgggccgcttctgtgccggcgttttttccttgaaagagaaccttgcccgagcggtaggctgtaatggtacagcccggaggcttagcctggaagacggcacccttcggaacggcgggagtaagggagccggcataggattgtttcatttgttccatagcggaagcggatacttttataacagaatgggacacgatataatctccttttttggcacttttcactgtatataccagtgtatcataacagcccgaggctcgtctttccattcaaacgataatcgtggtatgataggaactaggattctcgcggaatggaggagaaacgttgtctgacggcaaaaaaaccaaaacgacagtaaacatttacggccagcacttcaccattatcggggaagaaagcaaagcgcatatgcgccatgtggccggagtggttgatgataaaatgagagaaatcaacgagaaaaatccatatcttgatataaataagctcgctgtattgactgcggtcaatgtcgtgcatgattatatgaaactgcaagaaaaatatgaaatactggagcggcagcttaaagaaaaggaatgaacaccatatgatagatatcatcatcttagttctgctcttaatgggcacattgcttggattaaaaagaggatttatcctccaatttatatatttaacgagtttcatcctctcgattgcgtttgcggcgcttttttacaaaaacctggccccgcatctgagctttatacccgcgcctgatttttccggcgggcaggcggctctgtcttttattaaaggaaacgtagagacggcttattacaacgcgatcgcgtttgtcattttgtttatcatcgcaaagattctgcttcggattatcggagcggcgcttaatattatcgccggcattccggtcattaaacagatcaataaactgctgggcggggtgctcggatttctggaagtctatttatttgcgtttatcctgttatacgtcgcatccgtactgccggtaagcgcgcttcaggatatgctcgcacaatcgacgcttgcaaatatcatcacacatcatacgccgtatctgtcagggctcctgcaagaactgtgggcccagtacggggcataaaaaacttctcttgaccggagaagtttttttcaagctctgcgtcagttgtgccggaggagaaaaatttgtatgatgagaagcaggaaacgactgggggttaacagtatgcataaaaaagatatcatcaggctgcttgaaacgattgcggtctatatggaactgaaaggggacaacccgtttaaaatatcagccttccgaaaagcggcagcggcgcttgagcaggatgaccgcagcctgtcggaaatcgacgacatgatgtctttatccggaatcggaaaaggcacctacggcgtcattcgtgaatatatgcaggaaggtgtgtccggcacgcttctccaattgcagaaagaagttccggaaggcttggttcctcttttgaagcttccgggcctcggcggcaaaaaaatcgccaagctgtatcaggaactgggcgttcatgacgcggaatcgctgaaagaagcatgcgagcagcaaaaagtacaggggctcgccggtttcggcaaaaaaacggaggagaaaatcctccaggctctcggagaagccggaaaacagccggaacggtttccgatcggctatgcgctcagcattgcttcagtaattgaagaacatttggcccggctgacggatattcagaaatattcccgggccggcagtctcagaagagcgcgggaaaccgtaaaagatctcgattacattatcgctacagatcatccggaggctgtcagagaacagcttctttccctcccgaacgtaaaagacgtgatagcgagcggggatacaaaagtatcagtcatcctgacctttgaatatgagacgagtgtggatttccggcttgtgacagaggaacagtttgccaccacactgcatcattttaccggttctaaagatcacaacattaaaatgcgccagctggcgaaagagcgcggtgaacggatcagtgaatacggagtagaaaccatggaaacgggagacgtcaaaacattcccgagcgaagaagcgttttacgcccacttcggtctgccgtttattcctcctgagctcagagaaagcgggcaggaggtcgacacgtaccgggaagaaacggatcttgtggagcataaagcgataaaaggcgatctccacatgcactcagcctggagtgacggcgctttttccatcagagaaatggcagaagcgtgtatggcaaaaggctatcagtacatggcgatcaccgaccattcccaatatttaaaggtagccaacgggttaacggccgaacggctcaaaaaacaggcggaagaaattgacgcgttaaatgctgaatttgaaaattttcatatttttaaaggcgtagaaatggacattctccccgacggttcgcttgattatgatgacagtgttctgtcggaaatggatcttgtcatcgcgtctattcattcaagcttcagccagccggagcatgtcattatgaaacggcttgaacaggcgctgacgaataagcacgtggacattatcgcccacccgacgggacgcctgatcggcagacgggccggctatgaagtcgacatcgacatgctgattgaactcgccgccaaaacaaatacggcgcttgaactgaatgcaaaccccgcgcgccttgatttacggactgagcatctgatcaaagcaaatgaaaaaggcgtgactttggtcattaataccgatgcccataatatcgagatgctcgatgatatgaaaacgggcgtgaccgcagcgcgcaaagggtggacggagacaaaacatgtgttaaacgcccggccgctacacgaggtcaaagcatttctgacgcgcaatgattaagtaaggaggatcacaaaaccgtgcagcaaaaagtgttatcatcacttgaatttcataaagtaaaagaacagattaccgcacatgccgcctcatcgctcggccgggagaagcttctgcagctgaaacctttgacggatctctcagacatccaaaaacagctggatgaagtcgaagaagcatccgcggtcatgcgcttgagaggccatgctccgttcggcggtctgaccgacataagatccgctttacggcgggcggaaatcggcagtgtgctgacgccggcggaattcaccgaattgtccgggctgctgtatgccgttaaccaaatgaagcattttatcagccaaatgacagaagacggcgtcggcattccgctgatacaggcccatgcagaagaactgattacattaggcgatttggaaagggagattaactcctgcattgatgaccatggtgaagtgcttgatcatgcgtctcctgctttaaggggaatccgcacgcagctcaggacgcttgaatcaagagtcagagaccggcttgaatcgatgctgcgttcatcttccgcttctaaaatgctgtctgacaccatcgttacgattcggaatgaccgctttgtcatcccggtcaaacaggaatacagatcaagctacggcggaattgtccacgatacatcttcatccggtgcgacactgtttattgaaccgcaggcgatcgtagatatgaacaactcgcttcagcaggcgaaagtaaaagaaaaacaggaaatcgaacggattctccggatgctgacggagcatacggctgaacacacacaagaaatcgctcaaaatgtggaagtgctgcagacactggatttcattttcgctaaagcgagatacgcaaaagcgatgaaggcgacaaaaccactcatgaacggagacggttttatccgtcttaaaaaagcacgccatccgctgctgccccaagatcaagtcgtggccaacgatattgaactgggcggagattactcaacgatcgttatcacgggaccgaatacgggcggtaaaaccgttacgttaaaaacactcgggctgctgacgataatggcgcaggcaggattgcacataccggctgatgagggatcggaagcagccgtatttgacaatgtgtttgccgatatcggcgatgaacagtcgatcgaacaaagtctgagtacgttctcatcccacatggtcaatatcgtcaatattttaaaagacgtgtctgaaaacagtcttgtgctgtttgatgaactcggtgccggaacagatccgcaggaaggagcggcgcttgccatgagcatccttgacgaagttcaccggacaaacgccagagtgcttgcgacaacccattatccggaactgaaagcatacggatataacagacaaggcgtcatgaatgccagcgttgaatttgacattgaaacgctttcgcctacctataagcttctgatcggagtgccgggccgaagcaacgcatttgaaatctcaagacgccttgggcttccggagcatatcatcggccaggcgaagtcagaaatgaccgccgaacataacgaagtcgatctgatgatcgcatcgcttgaaaaaagcaaaaaaagagcggatgaagagctttctgaaaccgaatcaatcagaaaagaagcagaaaaactgcacaaagaacttcagcagcaaatcattgagctaaacgcccaaaaagataaaatgatggaagaagccgagcagaaagctgcggaaaaactggaagccgccgcaaatgaagccgaacagatcatccgcgagctcaggtccatcaagcaagaacacagatcctttaaggaacacgagctgattgacgccaaaaaacgtctcggagacgcgatgccggcttttgaaaaatcaaagcagccggaaagaaagacagagaaaaaacgcgagctgaagccgggcgacgaagtaaaggtgctcacattcggacaaaaaggggcgctgcttgagaaaaccggcgagaaagaatggaacgtccaaatcggcatcctcaaaatgaaggtgaaggaaaaagatcttgagtttctcaaatcggctcctgaaccgaaaaaagaaaaagcaatcaccgccgtaaaagggaaggattatcacgtatcccttgaacttgatctcaggggagagcgttacgaaaacgccctcagccgcgtcgaaaaatatttagatgacgcggtgcttgccggctatccgagagtgtccatcattcacggaaaaggcacgggcgccctccgaaaaggggtgcaggatcttctgaaaaaccaccgcagcgtgaaaagctcgcggttcggggaagcgggagaaggaggatcaggcgtaacgattgtcgaactaaaataaaaagggagtaaacgtcatgaatgctttttgggaaaatgagcttgttgaaatcgcggcttattacagtgtagccgtcttgtgtctcgtcatttttctgaccgtgtttgaattggtgacatcctataaaaactgggtggaaatccaaaaaggcaatcttgcggtggcaatggcgaccggagggaaaattctcggtatcgcaaatgtctttcagcacagcatcgcccagcataattcgcttttgcaaatgatcggctggggcgtatacggatttattatgcttttaatcagctattttatctttgaatttctgacgccccggtttaaaattgataaagaaattgaaaaagataacagagctgtcggctttatttcatttgtcatctcagtcggcctgtcattcgtggtggccgccgggatttaaggggacggggaaaaatggagaagcttgcgaaagtgctgctgtcggcagcgggaatttttctgttcatcggacttatttatctggtcatgacatcttaatactgaaaaaaggctgccgaactagaatcggcggccttttttattgagaataccagtttatgcaggccgtatcagagcaaatgacggcttcccaactcatggcgcggatgacagacggcatgtcttgatcttccatgagaaagagtgtcgtaaaagaatcatatatgctcataaaagcggcgcgccgtttttcgtcggcaatgatcatgtcagcccgcagcaatccgcatacatccgaagccgccgtttgattgagtgaaaatatgcctttctcttcgaccggctcataataagtgcagcgctttatgccttttgaacggaacacatccaaaagtcccggtatcaaaaatggcgaagtgacatcatcgctcggcaagtacagatcgggatgatgaagccgatttaacagctcggcggattcaggatgtgcatattcatcccgaagtgccatgacagcgctcataagcgcaagcgccgtctctttttcagagcgcaatccgcaaacggtcatgacggatttccaggaaacgggtctgcccatcgcgatgatctcctcatcactcggatatatatgttcataaggccgtttgcgcttttgctcttcccacccatcaggcatccggacaaagggatgaagcaaaaaggcggccgacgtaaacggcttcggcagctggcgcaggataggaactccttcttcaaaatgcagcgtttccagcaagctcaacacctcctgaaactcgaaatttcacatgaaacgctttcccattccaatcacccttctgctataataatagcgtataggaaaacagaagggagaggtattatgcagtctgaaaagccatggctttctcaatatcccgaagagattccgcatgagcttgaatttaccgatcaaaccctgccatccaatctgacaaactccgcagctcaattcccgaaccataccgccatttattttctcggaaaaaaactcacatttcaagacgttctcacagattcgttaaagctagccgcttttttacgcaaaacaggcctgaaaaaaggtgacagagccgccattatgctgcccaattgtccgcagtcggtcatcgctttttacggcgtattgtttgccgggggcattgtcgttcagaccaatcctctctacacggaacacgagcttgagtatcagctgaaagacagtgcgccgcgcgtgatcatcacccttgatatgctgtttccgaaggtgataaaaatgaaaacgttatcaatcgtcgaacgcattattacaacaagtataaaagactttttgccgtttccgaaaaatatgctgtatacgctcacgcaaaaacaacaggtgcatattgattatgacggctgcgaacaaattcacaaattagcggatattttaaaaaacgaaagcgcggaggaggcagagccatttgatattgaccctgcgcatgacatcgccgtgcttcaatacacgggcggaacaaccggctatccgaaaggcgtcatgctcacacaccggaacattcaggccaatacagaaatgtgcgccgcctggatgtacaaaatgaaaaagggagccgaaaaggtgctcggcatcgtgcctttttttcatgtgtacggattgaccgccgtgctcaatttttccattatgcagggatgtgaaatgatccttcttcctaaatttaatcctttggataccctgaaaacaatcgacaggctgaagccgacggtttttcccggggcaccgacgatttacatcgggctgttgcatcacccggagctgaataagtatgatttgtcctccattgaaagctgtccgagcggttcagcggcgctgccggttgaggtcaaacagaaatttgaaaaagtgaccggaggaaagcttgtggaaggctacggattatccgaagcatcaccggttacccattcaaacttcatttggggaaaaaataaacccggcagcatcggctgtccctggcccaataccgacgccggaatctattcagaagaaaaaggcgggcttgcggggccgtatgaacacggcgagctgatcgtaaaaggccctcaggtcatgaaaggatactggaataagcaggaggagacggcgcgtgtcatcagagacggctggctgtttaccggagatatgggatatatggatgaggaaggatttttctacatcgccgacaggaaaaaagacatcatcattgccggcggatacaacatttacccccgggaggtggaggaggcgctttatgagcatgaagccgttcaggaaatcgtcgtagcgggcgtccctgattcctacagaggggaaacggtgaaagcatttatcgttttgaaaaaaggcgccgaggcagatgccgatgagcttgatgcgtttgcaagagagcggcttgcgccgtacaaagtcccgaagctttacgaattcagaaaagagcttccgaaaacggccgtcggaaaaatattaagaaggcgtttagtcgaagaagaagatgcttcccgtgaaaacaaggtgccttaaaagaaaaacttgacaaaatccggattcctttttatcatgaagttatgaatgaatagtcattcatttatcgaaggaaggaacgatgacattgaaccaaaaacggccaaagtatatgcagattattgatgcagcagtagaagtcatagcggaaaacggctatcaccaatcacaggtgtccaaaatcgccaagcaggccggcgttgcggacggcaccatctatttatatttcaaaaacaaagaggatatactcatttctctttttaaagaaaagatgggccagttcattgaacgcatggaagaagaagtgaaagaaaaaacgacggcaaaagaaaaactcgccctcgttattaagcagcatttcacactgctcggcaatgaccgccacctcgcgattgtgacccagcttgagctcagacagtcaaatatcaagctgcgcctgaaaatcaatgatattttaaaaggttatttaaacatgctggacaccattttgaccgaaggaatcaagtcgggggaatggaaagacaatctcgacgtccgcctcgcccggcagatgatattcgggacgatagatgaaacagtgacaacatgggtgatgaacgatcagaaatatgatcttccggatttgtcagacaaggtattggagctgttggtgtcagggattcatcaaaactaaagggggttgacggatgaacagcctttcgatggcggtagaacaatctgttgcggtgattaccattaatcatcagccggccaacgcgctatccggtgcggttttagatgagttgtccggtctgttcgaccgatgtgaaacagatgacagcgtcagaagcatcatcattcgcggtgaggggaaatttttctcggcgggcgccgatataaaggaatttacgtcgcttgaaaatcttgagcaatcttctgccatggcggataaaggccagcagctgatggaaagaattgaagggtttccgaagcccgtgatcgcagcgattcacggcgctgcgctcggaggcggccttgagctagccatggcctgccatatcagaatcgctacattggatgcaaagctaggcctgcccgagctgaatctcggcattattccgggctttgccgggacgcagcggcttccccggtacgtcggtacggcgaaagcgcttgaaatgatcggcacttcagaacctgtgtccggagaagaagcgctcagcctcggtcttgtcacgataggcgccgaacatgaggaagagctgctgaaaaaggcgaaaacgctcgcgggcaagtttgcggaaaaaagcccgcagtcgatggcttatctgcttgagctcctttattcaaataagatctattcttatgacggcggcttaaagcttgaagcaaagcgctttggggaagcatttgcatcagatgacgcaaaagaaggcattcaggcatttctcgaaaaaagaaagcctcaattcggtgggcgaagataaaggggataaaaatatgaatctatttgtactgatgaaacggacgtttgacacagaagagaaaatcgtcattgaagcaggaaagattcaggaggacggggccgaatttatcattaatccgtatgatgaatacgccattgaagaagccattcagctgaaggaagagcacggcggaagcgttaccgccgtaaccgtcggcggagaagatgcggagaaagaactgagaaccgcccttgcgatgggctgtgaccaggcggtgttaatcaatattgaagatgatctgagcgatcctgaccaatactccatttcaactatcttatatcattatttcaaggaccgggaatatgatctgattctcggcggaaatgtcgcgattgacggcggttcaggccaagtggctccaaggcttgccgaactgctgaacattccttgcgtcacaacgatcacaaaactgacaatcagcggcgatgaagctgtggcagagaaagacaatgaaggggataccgaaatcattaaaacctcacttcctttagtcatcacggcacagcaaggcttaaacgagccgcgctatccgtcgcttccgggcattatgaaggcgaagaaaaaaccgctggaagaacttgagctcgatgatctcgacattgatgaagatgatgccgcaccgaagctcaaaacgatcgaacgttttctgccgccgcaaaaagaagcgggcagactgatcgaaggagaagccgctgagcaggcgaaagagcttgtgtcactgctgagaaaagaagccaaagtcgtataaaccgatattaaagaaactgggggatgtcagaatgggaaaaaaagtgatcgtactcggagaaattcgtgacggcgccttacggaacgtcacctttgaagccatagccgcaggcaaaaccatttccggcggaggagatgtcatcggcgtgctgatgggaaaaggcgcagctgatgcagcaccagaactcattcagtacggcgccgacaaagtatttacggccgattcgccggggctttctcagtatacggcggacggatatgccgcggttctcggggatttgatcgaaaatgaaaagcctgatgcggtcattttcggccacacttctatgggaaaagatttgtcacctaagcttgcggcccggtttgaaacggggctgatttcagacagcacggatgtaagcgttaccggagacaacatcgtttttacaagaccgatctattccggcaaagcctttgaacaggtgatttcaactgatccgttcattttggcgacgattcgtccgaataatattcaggcattagaaaaagacgcgagccggacgggtgatatcgaagagcttgcggcgcctccggcagatttgcggacggtcattgaagaagtagtcaaaaaaacggcggacggcgtggatttatcagaagcgaaaattatcgtagcaggcggccgcggtgtaaaaagcaaagatggatttgaaccgttaaaagaacttgccgaggtgctcggagcagcggtgggcgcttcacgcggcgcgtgtgacgcggactattgcgattattctcttcaaatcggccagacgggaaaagtcgtcacgccggatttgtatatcgcctgcggcatttccggagcgattcagcacttggcgggcatgtcaaacagtaaggtcattgttgccattaacaaagacccggaagcggaaatatttaaaatagcggactacggaattgtcggcgatttgttcgaagtggttccgcttctgacgcaggaatttaaaaatgccaatattcattcataatcataaaccctctggcttatttgtcagagggttttaatttgtgttaattggttcgtacaaattaaaggttgataaaataagagattgacatgtacgaaccaatataataagcttttgtaaagcgcttacaaacttatccattcagcatacatcccagatacatagatcggctgtagtgctttcattcttattaagggaaaggaatgatcaagtttgtctcacaatacggcagtcattcaaactgatatcacacggggaaccattaataaaaacatatacggacatttcgcggaacacctgggaagaggcatatatgagggcatctgggtcggaaaagattccgatattccgaataccggcggggtcaggacggatgtcgccgccgccctcaaacagcttcagattcccgtcctcagatggccgggcggctgttttgcagatgaataccattgggcaaacggcgtagggaaacgcaaaaccatgctgaatacccattggggcgggacgattgattccaatgaattcggcacgcacgagtttatgatgctttgtgaactgctcggctgcgaaccgtacatcgccggaaacgtcggcagcggaacgattaaagaaatggctgattggattgaatacatgacgtttgaagcgggcacgccgatgtccgactggagaaaagaaaacgggcgggaaaaaccgtggaagctgacatatttcggaatagggaatgagaactggggctgcggcggaaacatgcatcctgagtattatgccgacctttacagaaactttcaaacctatgtccgcaattacagcggtaatgaaatctataaaattgccggcggcgcgaatgtcgacgattaccgctggactgaaactttaatgaaaaaagccgctgatctcatggacgggctgagcctgcattattacacaataccgggcgacttctggaaggggaaaggatcagcgacggagtttacggaagatgaatggttcatcacgatgaaaaaagcggcgcatatggatgaattgatcacaaggcacagcgccatcatggatcagtacgatcccgaaaaaagagtcgggctgatcattgatgaatggggcacgtggcttgatcctgagccaggcacgaatccgggctttctgtatcagcagaatacgatccgcgacgcccttgtcgcagccacgcattttcacatttttcatcagcacgcagaccgcgtacagatggccaatatcgcgcaaaccgtcaacgtgcttcaggcaatgatcctgacagaagggaaagacatgctgctgacgccgacgtatcatgtgtttgatatgtttaaggtgcatcaggacgcttctcttttggcgacagaaacaaaagcagccgggtacgaatggaatgacggccggctcccgcaagtcagcatttcagcgtccaaacagcaaaacggagacatacatatcagcctttgcaatatcgatcatctgcacaaagctgatgtgaagattgaactgcggggcatgaaaaaggcagggaagccttcgggaacgattctgcacgcggaaaaaatgaatgcccataatacattcagcagtccggaaaacgtcaaacctaagccgttttccgggttttctcaaaagggcggaaaacttgaggcggagcttcctccgatggcggttgtactaatcacgctgcctgcgaatccatcttaagttttgaacgcctgccgcccggttataatacactgtataaataagattattttcggcgggatcgggagaaaataatataagcattaaattagcatgaacgaatgggagatgctatactaaaaatcatcatttgacaattggaggaataacaaatggctatcgtaaaagcaactgatcaatcgttctcagctgaaacaagtgaaggtgtcgtattggctgatttctgggctccttggtgcggaccttgtaaaatgatcgcgcccgttcttgaagagcttgatcaagaaatgggagacaaactgaaaatcgtcaaaatcgacgtggatgaaaaccaagaaactgccggtaaatacggcgtcatgagcatcccgacacttctcgtattgaaagacggagaagtcgttgaaacatctgtcggtttcaaaccgaaagaagctcttgaagagcttgtaaacaaacatctgtaagccgaaagcttccgttacggcagggcgattcctttgaagggaatcgcctttttttgaccttccaaaagctgagaatggagaaaaacaagtgttcgtgatacactgaatggacacgagaaatgaatgtaaggaagggtaacgtatgaataaacaactgaaagaaaaactggccctccttcccgatcagccgggctgttatttaatgaaagaccgtcaaaaaacagtcatctacgtggggaaagcgaaagtcttgaaaaacagggtgcgatcttatttcaccggttctcacgacgcaaaaacccaacggcttgtgtcggagattgaggactttgaatatatcgtgacttcctccaatcttgaagcgctaattttggaaatgaatctgattaaaaaatacgatccgaaatacaatgtcatgctgaaagatgataaaacctatccctttattaaaatcacccatgaacgccatccgcggctgattgtcacccggaatgtcaaaaaagacaaaggacgctatttcggcccgtatccgaatgtgcaggcggcgcgggaaacgaaaaaactgctggaccgcctttacccgctcaggaaatgctcaaagctaccggaccgcgtctgtctctattatcatctcggacaatgcctcgccccatgtgtaaaggatatatctgaggagacaaaccgcgagattgttgaagacatcacccgttttttaaagggagggcataacgaaatcaaaaaagagctcgaagcgaaaatggcagaagcggcggaaaagcttgaatttgaacgggctaaagaattccgcgaccagcttgctcacatcgaatcgacgatggagaagcaaaaaatgaccatgaatgaccttctggaccgcgatgtgtttgcatatgcctacgataaaggctggatgtgcgtccaagtctttttcatacgccaaggaaaactgatcgaacgcgacgtcagcatgtttccgatgtatcaggaagcggatgaagaatttctgaccttcatcggccagttctactctaaaaacaatcactttctgcctaaggaaattctggtgcctgacagcgttgacagggacatgatcaccgagctgttggaaaccgccgtgcatcagccgaaaaaaggcccgaaaaaagagctgcttttgcttgcgcacaaaaatgcgaaaatcgccctgcgggaaaaattctcgttaatcgagcgggatgaggaacggtcaatcggtgcagccgaacggctcggcgaagcgctgaatatttatacgccgcatcggattgaagcgtttgacaactccaatattcaaggcacaaaccccgtatcggccatgattgtctttattgacggaaaaccgaataaaaaggaataccgcaaatataaaattaaaaccgtaacagggccggatgattacggctcaatgagggaagtcatcagaagaaggtacacgagggtgctccgcgaaaatcttccgctgccggatttaatcatcattgacggcggaaaagggcagattaacgcggcgcgcgacgtgctcgagaatgagctcggccttgatgtcccggtagcgggattggcgaaagatgataaacaccgaacatccaaccttttgatcggcgacccgcttgaaccggtgtttctggagcggaacagccaagagttttacctgcttcagcgtattcaggacgaagttcaccgttttgcgatcagctttcacagacagatccggggaaaaagcgtctttcaatccgttctggatgatatccccggaatcggtgaaaaacgcaaaaaaatgctcttaaaacatttcggatctgtcaaaaagatgaaggaagcaagccttgacgatatcaaaaaagcgggtgtgccggccgcggcggcccagctgctgtttgaaaaattaaaaaaatagtattgtgcttttctgaaaaatctgctagaatgtgaactaatttcataagatcgtgttatatggtgaagatagaggtgcgaacttcattagtaagcctttggagaatgatggattctgcgaaaaaggctgaaaggggagcgtcgccgaagtgtatcacatcccatcggtgtgatttgctggccttgcattaaataaatgtaaggctgtcaagaattcattttcttggagggctatctcgttgttcataatcaatcgtaatgatatgaaaaagcaatgagagctattcctctcattgctttttttattgtggacaaaacgctcttttctcctcacccgcacgaaccaaaatgtaaagggtggtctagtatgggtcttatcgtacaaaaattcggaggcacttccgtcggctctgccgaaaaaattcaaaatgccgcaaatcgcgccattgctgaaaagcaaaaaggccatgacgtcgtagtcgtcgtttcggcaatgggaaaatcaaccgacgcgctcgttaacctcgcggctgaaatcacatctgaaccaagcagacgcgagatggatatgcttttgtctacgggagagcaggtcacgatttcgcttttggccatggcgcttcaggaaaaaggatatgacgccgtctcttatacgggctggcaggcgggtgtccgcacggaagccgttcacggcaatgcgagaattacggatattgatatcacggcgattcgttcgcagcttgcagaaggcaggattacagtcgttgccggttttcagggcgtaacggaagacggaggcatcacgacgctcggacggggcggttccgatacgacggcggtcgctcttgccgcagcgctggaagcggataaatgcgacatttatacagatgttccgggcgtatttacgacagatccgcggtatgtccggtcagcgagaaagctggcgggaatttcttatgatgaaatgctggagcttgcaaatctgggagcgggtgttcttcacccgcgggcggttgagttcgcgaaaaactaccaagtgcctttagaagtgcggtcaagtacggaacatgaagcgggaacattaattgaggaggaatcatcaatggagcagaatttaatcgtcagaggaattgcatttgaagaccagatcacgagggtgtccgttacgggcctgacaagcggactgactactctttcaacaatcttcaccgcgctggcaaaacgaaacatcaacgttgacattattattcagacacagtcggacgatggggaagcggatatttctttctcagtgaaaacggaagatgccgcgcaaacggtcgccgtgcttgaagaatataaaaacgcgcttgactatgaaaaaattgaaaccgaaagaaaactggcgaaagtctccattgtcgggtcgggcatggtttcaaatcccggcgtcgccgcggacatgtttgccgtactggcggaaaaaaatgtacaagtcaaaatggtgagcacatctgaaataaaagtatcagcggttgtcagcgaaaatgatatggtgaaagcggtcgaagcgcttcatgatgcgtttgagctttctaaacagccgtctgctgtgtaaacgggcaggcaaaaaggcgggacttggagtcaccgccttttttcaattatacagggtccttcatatcccattttacagtcaggacgactttatccgctctcttttttacctgttcataagattctgcgatctgatcgttcatcaattgaatctgttcggctataaaaccggcttcaagctgaaaacaaggctctttctgatgtttgagtctgctggatacgagcggtccttccagttcaaattccagttcttgtttttttgatcctgcgtttgtcaaagttccccagccggctttttcaaaaaaggcggggatttcttcccacgattgaagaggaaatttgcgggcgaggcgttttcccgcccaatacatcatcgatgaatactccgggccgaggatatccggaagcacgatttcccggattaattcgtagccgtatgcgctgacgtcgagttcagttaaaggttctaaagctgcttcataattattcttcatattatgtattcccctctctccttcgtttattatagcttaaacaggggggaggattacaggatgatcctataaaacacgcgaaaaaatgtgagaaagatatcgcaggaaaataaaattttccctccagataatcaattccgaaaattataatttatgtacacgttttcttgacgcccttttgagggaggagtaaaatgaaattgtcaataaattttaataaagtgcttacaattgaaacgaagtgggggcagagattttagtacatttcgcacttaaatcaaacagggggtaaagtaatgtctgggaacagagagttttattttcgaagattgcattccttgctcggtgttattccggtcggcatctttttgatccagcatttagtcgtcaaccaatttgccgcaaggggagcggatgcgtttaacaaggcggccggctttatggacagtctgccgttcaggtatgcgttagaaatttttattattttcttacctttaatttatcatgcggtttacggtgtgtacatagcatttactgcgaaaaacaacgctggccactacagttatttcagaaactggatgtttgtgcttcagcgtgtcactggtattctcacccttattttcgtcagctggcatgtatggcagacgcggattgccgcgcagatgggcgctgaagtcaacttcgatatgatggcgaatattttgagctcgccgtttatgctcggtttttacattgtaggcgttttatcggtcatttttcacttttcaaacggcttatggtcttttgcggtcacatgggggatcacggtcacgccgcgttctcaaagaatttcgacttacgtgacgctgattatatttttagcgctttcatacgtaggtttaaaagcgatttttgcgtttgtgtaagagaactagattactagagggagaggggctatcatgagtcaatcaagcattatcgtagtcggcgggggtcttgccggcctcatggcgacaattaaagcagcggaatcaggcacggccgttaaattgttttccatcgttccggtcaaacgctctcactcggtctgcgcgcagggcgggataaacggagctgtcaacacaaaaggggaaggagactctccgtttgagcattttgatgacacggtatacggaggcgactttttggcaaaccagcctcctgtaaaagcgatgtgtgaagcggcgccgtccattatccacttattggaccgcatgggggttatgtttaacagaacgccggaagggctcttggacttccgccgtttcggaggtacacagcatcacagaaccgcatacgcgggagcgacgacgggtcagcagcttctttacgcactggacgagcaggtgcgcagatatgaagtggcgggtctcgttacaaaatacgaaggctgggaattcctcggcgccgtgcttgacgatgagcgcacgtgccgcggtatcgtagcccaaaatctgaccaatatgcaaatcgagtcattccgttctgacgccgttatcatggcgacgggaggacccggaatcgtattcggaaaatcaacaaacagcatgatcaatacgggatctgccgcatcaatcgtctatcagcagggcgcttattatgcaaacggcgaatttatccaaattcacccgacagcaatcccgggggacgataaactgcgtctgatgagtgaatcggcgcgcggcgagggcggaagagtctggacgtataaagacggaaaaccttggtacttcctcgaggaaaaatatccggcttacggaaacctcgtgccgcgggatattgcgacacgtgaaatctttgacgtgtgcgtgaatcagaaactcggcatcaacggagaaaacatggtgtatcttgatctgtcgcacaaagatccgaaagagcttgacgttaagctgggcggcattatcgaaatctatgaaaaattcatgggcgatgacccgcgcaagcttccgatgaaaattttccctgccgttcactattcgatgggcggactgtgggttgattatgatcagatgacaagcatccgcggactgttcgcagcgggtgaatgtgattattcaatgcacggaggaaaccgtttaggggcgaactctctgctttccgccatctacggaggaatggtggccggaccgaatgcggtgaaatatgtttccggacttgaaacatcagcggaagacctgccttcttcattatttgattcctatgtgaaaaaagaagaagaaaaatgggccgatattatgaagatggacggcgacgaaaatgcctacgtgcttcaccgtgagctcggagaatggatgacggccaacgtcacggtggtccgccacaacgacaagcttttgaaaacggatgacaaaatccaagagctgatggaacgctttaagaaaatcaatatcaacgatacgacaaaatggagcaaccaaggggcgatgttcacccgccagttctccaatatgcttcagcttgccagagtcatcacgctcggcgcatataaccgaaatgaaagccggggagcgcactataaaccggatttccctgaaagaaatgacgatgagtggctcaaaacgacgatggctaaacatgccggtccgtttgaagctccggaatttgaatatcaggatgtcgatgtatcactgattgcgccccgtaaacgcgactactcgaagaagaaggtggcgaaataatcatgagtgagaaaaagatacggtttatcattacacgtcaggatacgcccgaaagcgcgccatacgatgaagaattcgaaatcaattaccgcccgaacctgaacgtgatttccgccctgatggaaatccgcagaaatcccgtgaatgcaaaaggagagaaaactactccggtcgcatgggacatgaactgtcttgaagaagtatgcggcgcctgctccatggtcatcaacgggagaccgcgccagtcatgtacggcgctgattgataagctggaacagccgatccgtctgaaaccgatgaaaacattcccggttgtccgtgaccttcaggttgaccgcagcagaatgtttgattcactgaaaaaagtgaaagcatgggtgccgattgacggaacttacgatttggggccggggccgagaatgccggaaaaacgccgccagtgggcatatgaattgtctaaatgcatgacatgcggcgtctgcctcgaagcctgcccgaacgtcaacagcaagtcgaaattcatggggcctgccccgatgtcgcaagttcgtctgtttaacgcccatccgacgggcgcgatgaacaaagcagaacgtttagaagcgttaatgacagacggcggcctcggagattgcgggaattcacaaaactgtgttcaatcctgcccgaaaggcattccgcttacgacttcaatcgccgctttgaacagagataccaatttacaagcattccgtaatttcttcggaagcgacagagtataagaaagagaaaaagagcctcttccgcacgggagaggtttttttataaggagctgaaggtgatgaaacaaccgcaatatattgatgtcccgtttgaagaatggagacagtcgttttctttctttactgaagtatcggttcgtttttcagaaacggatatgttcggccatatgaataatgtaacccctttcatctattttgaagaagcgcggatcgcttatttcaaacagcgaggcataacggcgcaaaactcggaaacgatgacggtcgtcgcaagccagcagtgcgactatatgcgtcaggtgatgccgtatgaaaatctgcggatttatgtgaaagcaagcgctgccggaaatgcgtccgtcacccttcattaccttggagaaaatgagtcgggcctgccgtgctttacaggttccgtcgttatggttcaagtgtcgaagaaaagcggcaaagcggtcagctggacggagcgggagaaaggcattctgctcgcctgaacggataactatttctctaagagacgtcacctccgaagcgccctttacatatgatatcttgactatataaacccattcgtttcagattcgctctcaccttagcaaggagggttacaatacttgaaggagaaagattttcaatcaaagccgctgctgaccaaaagagaaagagaagtattcgaattgctcgttcaagacaagacaacaaaggaaattgcaagcgagctatttatcagtgaaaaaactgtacggaatcacatttcaaatgccatgcagaagttaggtgtgaaagggcgttcgcaagctgttgtcgagcttcttagaatgggtgagctagagctctgattcttgccggttttccttcttttcgagaaggagccggttatttgcgttggcgcccgggctgatgggcatgcggtgaaaatcccggtttttcctttttctccgtcagtcttgcattttcttaaaaaaagaaggaaaatagacacggagcgcatagcccagaaagatccttgagtgagggatggacaaatgacatcaaaatctgtagagcatgttgcggatatcgaaaaatcactccgccatatcgctgcgatcattaaacaaaaaggaagagaaatccttaaccaatatgcaattacaccgccgcaattcgtggggcttcaatggctttatgaattgggggatatgacaataggcgaattatcaggcaaaatgtatttggcttgcagcacgacgacggatctgatagaccgcatggaaaaaaataagcttgtcgagcgggtgaaagacccggccgacagacgggtcgtcagaattcatcttctcgctgaaggagagcgcattatccaagaagtgattttgaaaagacaggcttatttgagggatatgtttgcgacattttccgaagaagaaacagccgctttcgaaaaatcattattgaaactgcagcatgaaatgaaaagaaaatgaggcgattttgttggaacagccgataggagtcattgattccggggttggcgggttaaccgttgctaaggaaatcatgagacagctaccgaaggaaaatatcatctatgtgggagatacaaaacgctgcccgtacggcccgcgtcctgaagaagaagttcttcaatacacgtgggaaatgaccgattacctgctggaaaaccaccatatcaaaatgctcgtaatcgcctgcaatacggccacggccattgccttggaggatattcagcgcaaaacggatattccggttgtcggcgtcattcagccgggtgcaagaacggcgataaaggtcacgaaaaaccagcatatcggcgtcatcggcacggtcaataccattaaaagcagagcgtatgagcaggcgctgctcggattaaacgcagaacttcaagttaagaacacggcttgtccgctgctcgtgccgtttgtggaaagcggacggtttcttcaggaatcagcggaggaagcggttgaagcatcgcttgagcctttaaaaggtacatcaattgacaccttgattttaggatgtacgcattatccgattttaaaagatccgattcagaactatatgggagagcatgtgaaaatcatttcctccggagacgagacggcgagagaagtgagcaccatcttgtcttataaaggtttgttaaaccaatcgaaacatgcaccggagcatcaatttcttacaacgggagagcggaacggtttcgcaaaaattgccgaagactggttcggccacgaaatcggccatgtcgagtgcatctcccttcaagagccggtcagaaaataaatcaaaaaaacccgctgtttacggcgggtttttttgcgcttcccggtctatttcccggacagggctcgtatacatcatagtacaaacagccttaggagggaaaagtatgctgaaaaaaggacctgcagtcattgctgcaacatgtcttacttcggcttttgtgttatctggatgcggtttgtttcaatccgataaaacagccggggaaattgacccgcctcaagacatttcatatgtaaaggatgaagcgggaattcaggcaaaaccaaagcagtcagagaaaaacggcacttctaaagccgaccagccggccaatacagtcatgcgagagctgtatctgattgataaaaacggctatgtcgcagcacagacactgcctcttccgaacagtgagggaaccgcaaagcaggcccttgagtatttggttcagggagggcctgtgtcagaaatcctgccgaacggcttcagagcggtgctccctgcggatacgacggtaaatgtcgatattaaaaaagacggcactgccgtcgctgatttttcgaaggaatttaaaaactataaaaaagaagacgaacaaaaaatcctgcaatcgattacatggacgcttacccaattcagctcaatagataaagtcaaaatcagaatcaacgggcacgaactgaaagaaatgcctgtgggcggcactccgattacgggcgacttaagcagaaaagacgggattaatattgaaacggccggagtgaatgatctgacagacacccatccgctgactgtctattatctggcggaaacagagacaagcgaatactacgtgcctgtcacaaagcggattgacaattcggaaacagatgacatcaccgctgccgttgaacagctcgccgacggaccgggcaaagcaagcgggcttttgacggactttaataacgatgttaagcttctcagcaagccgaaagtgaaagacggccaggttacactggactttaacagctccatttacggaagcgccgacgaaaaaacaaaaatggtatcatcgggcgtattggacagcatcgttctcacgttaaccgaacagccgtcgattaaaagtgtttctataaaagtaaacggaaaatcagaactggtgaatgaaaaaggagaatccctttcaaaacctgtttcgaggccgtcacaagtgaatacgggtagtttttaatttgcgatttttgatatactagtaaaaaagaggttagcgttccggctgcctctttctttattcacaatccggaacaaaaggtttatgtacatataatcggaggtaaaatatgagacacgacggaagacagcacgatgagctgcgccctatcacatttgatttggattttatcactcacccggaaggctctgttttaattacagcgggaaatacgaaggtcatctgtaatgcatctgtggaagaccgggtgccgccatttttacgcggcggaggaaaaggctggatcacagcggaatacagcatgcttccccgcgcgacgaatcaaagaacgataagagaatcttcaaaaggaaaggtctccggcagaacgatggaaattcagcggctgatcgggcgcgcgctccgggccgtcgttgatttggagaagcttggcgaacgcacgatctggatcgactgtgacgtcattcaagctgacggcggaacaagaacggcttccattaccggcgccttcttggcaatggccattgcgatcggcaaactcgtaaaaagcggcgttatcaaaacctctcctgtgacagattatctcgcggccatttctgtcgggatggataaagaagaaggccttcttttggatctgaattatgaagaggattcggcggctgaagtcgacatgaatatcatcatgacgggaagcggacgttttgtagagcttcaagggacgggcgaagaagccacattctcccgtgaagatttaaacggactgttaagtcttgccgaaaaaggaatccagacgcttattcaaaagcaaaaagaagtgctggcagaaacattgcctgaactgaaataagaaagagaggcctgatcagcgtgaaagaagccattattgcgacacacaatcagggaaaagtgaaagaattcaaggaaatactcgaaccgaaaggctacagcgtctcttctttggcggaaatcggatttacggaagaaattgaagaaaccggacatacctttgaagaaaacgccatcttaaaagcggaagccgtggcaaaagccgtcaacaaaatggtcattgcagacgactccggtttatcggtggacaaccttggaggcagaccgggcgtttattcagcccgttatgccggagaagcaaaagatgataaagcgaatatggacaaggtgctgtcagaattaaaaggcatcgaaaaagagcagcgcacggcccgtttccgctgcgcccttgccgtcagcatgccggggcgggaaacaaaaacggtcgaaggtcatgttgaagggtatattgcggaaggacccgagggggataacgggttcggctatgatcccatttttattgtaaaagataaagataaaaccatggcccagctgacaagcgctgagaaaaacaaaatcagccacagggctgaggcgctcaagaaactgtcaaagctgcttgattcataagggggagcgtatgcaatgaaagtgctgataataagtgacagtcacggccttgaagacgagctggagacgattgcaaagcggcacgaagacgaagcggatctgatgattcattgcggtgattcagagcttgacgccgcacatccggcgcttacgccgtttcacacggtaaaaggcaattgcgactttggcggcgggtttcaggatgaacttcttctggacgcaggttcaaagaaaattctggccgttcacgggcatcttcacggcattaaacagtcacttttaactgttttttaccgggcggaagagcttggggcggatatcgtctgcttcggccattcacatattgccgggagtgaagagcttcggggcaagcttttgattaatccgggcagcatccgtcttccgagagtccgcaatgtgaaaagctatgccattcttactcttacagaaagagaaggcgccgtgacattttacgatgaaacgggtcgggaattgaaggactttgggaatacaatcagtttttaacaagtgatgggggagatttcattcttccccatcaaaagtttttaaaaaaatattgacttatgatttgaacctgtatataataaatcttgtcgctgatacataaagcaaaagctgtcccagtagctcagctggatagagcaacggccttctaagccgtcggtcgggagttcgaatctctcctgggacgtataaaaaaagagctggtgacatcagagtgaaaactgatgccgctggccttttttatcggatgactatattgtcaattcgctgatatcatggtaaaatgatcagcagaacaatttgattttcatgtcccagtagctcagccggatagagcaacggccttctaagccgtcggtcgggagttcgaatctctcctgggacgtataaaaacctcaagccctgacaatgggtttgaggtttttttgtattttattttttgttttacgaaacaaaagttccgtatttgatgaaaattgtaaagtaattttaatataaatgaaacttaatgtaatatttatcgtaataaatatatgtataaagatacttaaggcgcccttgagtgataaattatctaatttctatcatacattttgtcaatgaatgatagaaagacagcaggaggaattagcttttgaagtacgcatttgcatataaaaatcacaatatagaaacgatcttttgcggaaaagacgagctgtttgaggaactgaagcaatttttaatcactcaatgcggtttaatcattgttgaggtttcaagggctgattactatacggagcaggaaatgaatcaatggaatgaccgttatactctgtgaataagaaaagaaaccggccgtgggaggccggtttttgtatcatctgaatccgctcggagcgctgaagcccccggcatggccgctgaaaccgcccccgagcgcgccgggatgcgccccggcgccgaggcttccgccgacgtcactgaaggattggccgtagtacccggttgtataagggtacggaacgaattgctgcccggcgaatgacagcgtgctttgcggggtctgctgtccgtatccggatgacgggaatccctgctgaaaagaagggccgccttgatttggtgctgtatgcatcggggccggaggatagtaagactgcggcggtaagaccggtaaaggcggaaatccaggaggcaggccctgcatgcctgataacatcttattcatgacatcactcatttcttacgagataagaacagtgtatgcgtatgtctgtagaaagagcctgttcaatcgaacggaatatctgacaagcatgccggaaggacagagaaaaattgtgtaataaaatgtgacatattcgtatatgaacggaaaaatttcatgtaatcttgagagattaataaaaaaatgataaaaacttttaacatttacagatccctttgtaccagtaatgaaagcgtatacaaaatagattgattaatctaaattgtctaataattataaaaatgctgttgacactgtctgcaaacgggcgtaatatgagttcaaacaaaaacaaataaatgattcacgctaaaaagaaaaatcataaaacactgaaaaaacaaacaaatgaaggttcttttttaataaaagagctgccataataaaaagcgcagaagaggataagtagctttgctgaagtttttcacagagagccggtaacgctgagagccggtaaaacaaatcaaagtgaactcccctcagagtgccggtctgaaatatgaagagtaggactcggccgagtgaacgcaatgtttactcgttatcaaaacggatattcattatccatgagacggtctgcatatgaccgtaaacaagggtggtaccgcggaaagcaaagccttttcgccccttttggctatcgcatgaaatgcttggctgaatgtgggtgggaaggcttttttatttgcgtcagccggcgctgcgttttatgaattggattttagaagggaacattgaaaaggaggaactgaaaatgggtacaaatgtacaggcggattctttgtctgccgaatgtacaaaaacaatgaacggggctctgatgctgattgaatcattaaagaaagaaaatgtcgagatgatcttcggctatccggggggagccgtccttccgatttacgataaactgtatcaatcaggattggttcacatcctgccccgccacgagcaaggcgcgattcatgcggcagaagggtatgcgagagtctccggaaagccgggggttgtgattgctacttccggacccggagcgacaaatttagttaccggtcttgcggatgcgatgatagattcattgccgctcgtagtgtttaccggtcaggtggccacttcggtcatcggcagcgacgctttccaggaagccgacattttaggaattacgatgccgattacgaaacacagctaccaagtccgccgtccggaagatctcccccgtgtgattaaagaggcgttccatatcgccacgacgggaagaccgggcccggtattaattgatataccgaaggatgtcgcagcatttgaaggagagttcagatatgatcacgagatcagccttccgggttatcagcctgtaaaagagcctaactatctgcagatccgaaagctcgtggaagctgtcagcagtgcgaaaaagccggttattttagccggagcgggtgttttgcacggtaaagcttcagaagatttaaaaaattatgccgaacagcagcaaatcccggtagcgcacacgcttctcggtctgggcggtttcccggcagaccatcctctttttctgggaatggcggggatgcacggcacatacacagcgaatatggcgctttaccactgtgatttgttgatcagcatcggagcgcggttcgatgatcgcgtgaccggaaatctgaagcattttgcaaaatcggccaaagtggcgcatatcgatattgatcctgctgaaatcggaaaaattatcgaaacgcagattccggtggtcggcgacagtaaaatcgtccttcaggaattattgaagcaaaacggaaaacagggacagacagaggagtggaaacagcagctttcagaatggaaagaagaatatccgctttggtatacagacaacagagaagagggcttgaaaccccaaaagctgattgagtatattcaccaattcacaaacggtgaggcgattgtggcgacggatgtcggccagcaccagatgtgggcggctcagttttatcctttccgaaaggctgataagtgggttacctcggggggactcggcacaatgggcttcggccttccggcggctatcggagcgcagctggccgatcgtaacgccacggtcgttgccatcctcggagacggcggttttcagatgacccttcaggaattagatgtcatccggcagctgaatcttcctgtcaaagtggttatcttgaacaacgaatgtctgggcatggtcagacagtggcaggaaatcttctatgaagagcgctattctgaatccaaattctcggcgcagcctgactttgtcaaattgtcagaagcctacggcattaaaggcgtccggatttcatcggaggaagaggcggaagaagagcttaaaaaggcgctttcatcaaaagaaccggccgttattgacgtccgggtcgccaaaagcgagaaagtattcccgatgattgcgccgggtaaaggacttcatgaaatggtgggggtgaaaccttgaaacgcattatcacattaacggtggtcaaccgctcgggagtattaaaccggatcaccggcctgtttacaaaaagacactataatatcgaaagcatcactgtaggccacacggaaacaagcggtgtttcaaggattacatttgtcgtccatgtggaaggcgaaaatgacgtagagcagctgacaaagcagcttaacaaacaaattgacgtcctgaaagtgacggatattacaaaccaatcgattgtacagcgtgagctggcattaatcaaagttgtttccgcaccgtcggccagaacggaaatcaatggaatcattgagccgttcagagcttccgtcgttgatgtctcaagagacagcgtcgtcgttcaggttaccggcgaatctaataaaatcgaagcgctcatagagctgctcaaaccctacggcattaaagaaatcgcgagaacgggcacaacggcttttgcgaggggaacccagcagaaggcgtcatccaataaaacaatttcaattgtataacacaaaaaagggagagattaaaatggtaaaagtatattataacggtgatatcaaagagaacgtattggcaggtaaaaaagtagcgattatcggttacggttcacaaggtcacgcacatgcgctgaacttaaaagaaagcggaattgatgtcattgtcggcgtcagacaaggaaaatcatttacacaggcccaagaagacggtcatcaagtcttttcggtaagagaagcggctgcccaggctgatatcattatggttcttcttccggatgaacagcagcaaaaagtatatgaagctgaaatcaaagatgaattgacggcgggcaagtcattggtattcgcacacggatttaacgtccatttccatcagatcgtgcctcctgctgatgtggatgtattccttgtcgcccctaaaggaccgggacaccttgtcagaagaacatatgaacaaggcgcgggcgtaccggcattgtttgccatctaccaggatgtatcaggcgaagcgaaagatacggctcttgcttatgcaaaaggaatcggcggagcgcgtgcgggcgttcttgaaacaacatttaaggaagaaacggaaacggatttgttcggtgagcaggctgttctgtgcggaggtttaacggcgcttgtcaaagcgggttttgaaacgctgacagaagccggctaccagcctgaactcgcatacttcgagtgtctgcacgaactgaagttgatcgtagacttgatgtatgaagaaggattggcgggcatgagatactctatctccgatacggctcaatggggagattttgtctcagggccgcgcgtagtcgatgcaaaggtaaaagaatcgatgaaacaagtattaacagatattcaaaacggtacattcgcgaaagaatggatcgtggaaaaccaagtgaaccgtcctcgcttcaatgcgatcaatgcaagtgaaaacgagcatcagattgaaaaggtcggcagacagctccgtgaaatgatgccgtttgtcaaacaaggcaaaaagaaggaagcggtggtctccgttgcgcaaaattaatgttttcgacacgacccttcgtgacggtgaacaatcccccggggtcaacctcaattcccgggagaaactggcgatagccaagcagcttgaaagactcggggtggacattattgaagcgggatttcccgcttcatcccgaggtgattttttagccgtgcaggaaatcgcaagaacgattaaaaattgttcggtaacagggcttgcccgatctgtcaaaggtgacatcgacgcagcctgggaagcgctgaaagacggggccagcccgcggattcacatctttatcgccacctctgacattcatctgaagcataagctgaaaatgacgcgggaagaggttaaggaaaaagcggttgaaatggtgaagtatgcaaaagaacgctttccgatcgttcaatggtcagcagaagacgcatgccgcaccgaacttccgtttctggctgaaatcgttgaagaagtgattgatgccggcgcgagcgtcatcaacctgccggacactgtaggttacctgacgccggctgaatacggaaacatctttaaatatatgaaggaacacgttccgaatatcagccgggtaaagctatcagcccattgccacgatgatctcggaatggcggttgccaactcactttcggcaattgagaacggcgctgatcaaattgaatgcgccattaacggcataggagaaagagccgggaacgccgcgctagaggaaatcgccgttgcgcttcatgtcagaaatgacgcgcatcaagccgattcatctctcaatcttcatgaattgaagcggacgagtgatcttgtcagcaaactgacgggtatggcagttccccgcaacaaagcaatcgtcggagataacgctttcgcacatgagtccggcattcaccaagacggtttcctgaaagaaaaatcaacatatgaaatcatttcaccggaacttgtcggcgtgactgctgatgcacttgtactcggaaagcattccgggcgccacgcgttcaaagaccgcctgaatacgcttggattccagtttgatagtgatgaaatcaataaatattttacgatgtttaaagaactgaccgcaaagaaaaaagaaatcactgatgatgacttgatttctcttattttagaagaaaaagtgacagacaaaaaaatcggctatgaatttttgtctctgcaagtgcattacgggacgtctcaggtgccgactgcaacagtctctttaaaaaatcaggaaaacgaacagctgatgcaagaggcggcaacgggggcgggcagcgtagaagccgtttataatacgctcgggcgctgcatcgataaaaatattgaactgacagactaccgcatccaatccaaccggaaaggcgaagacgcgctggctcaagtttttgtcagagtgaccgtgaacggaaaagaaacatcagggcggggaatcgcgcaggatgttctggaagcttctgctaaagcttatctgaacgccgtgaaccggcagctggtgctggattgcaatttagacggattaaagagacagactgcggtcggctcgtaatagaaaggagaacgtttgatttgaaaaaacgcattgctttgctgcccggtgacggaatcggaccggaagtggcggaatcagcggcagatgtattgaaaagcgttgccgaacaattcggacatgaatttgaatttgaaaacggactgatcgggggagcggccattgacgcccatcaaaacccccttcctgaggagacggtggctctttgtgaaagatccgacgccatcctgctcggggcagtcggcgggccgaaatgggaccaaaatcctccggagctcagaccggaaaaaggcctgctcggcatcagaaaaaaactcggcctgtttgccaatttgcgtcccgtgaccgtatttgaaagcttgtctgaggcatctccgctgaaaaaagaatatatcagcggcgtcgactttgtaatcgtcagggaactgacgggcggcctctacttcggagaaccgagcagacagtatgtcaatgaagcgggagaaaaggaagcggtcgatacccttttttataagaaagaagaaatcgcacgcgttgtcagagaagcctttaagatggctgccggcagaaaaggaaaagtgacgtccgttgataaggcgaatgtgctttcttcaagcaggctgtggcgggaaaccgcagaggaaatcgcaaaagaatttcctgatgtgacgcttgaacatatgcttgtcgataatgccgcgatgcagctcatctacgctccgagccaatttgacgtcatcgtaactgagaatatgttcggcgatattttaagcgatgaagcctccatgctgacaggctcgctcggcatgctgccgtcagccagtttatcaagttcaggtcttcacttgtttgaacccgtgcatggatctgcgcctgacatcgccggtaaagggatggccaatccgtttgcggcgattttatcagctgcgatgcttttgagaacatctttcggacttgaaaacgaagcgcaggcggtggaaaaggcggtcgcaaaggtgcttgcagacggcagccgtacacgtgatatcgcccgggacggccaatatgccggaacgcatgacattactgaaaaagtaaaagccgcattagccggctcgaatacaaaatctatagtgtgacgctttaaagaaagcggtcttagttcataggtagagggaggaaacaaagatgatgcctcgaacaatcatcgaaaagatttgggatcggcatgttgtaaaaagcggtgaaggaaaacccgaccttctctatattgacctgcacctcattcatgaggtgacgtctcctcaggcgtttgaagggttaagacagaaggggagaaaggtcagacggccgcagaatacattcgcgacgatggaccacaatattccgaccgtcaaccgttttgacattaaagatgaagtcgcaaagcgccaagtaaccgcgcttgaacggaattgtgaggagtttggcgtccgtcttgcggatcttcacagcgcagaccaggggatcgttcacgtagtcgggcctgagcttggtctgacacttccggggaaaacgatcgtttgcggagacagccatacatcgactcacggtgcattcggggcgcttgccttcggtatcggcacaagtgaggtggaacatgttctttccactcagacactatggcagcagcggccgaaaacgcttgaaatccgcgttgacggaacgctccaaaaaggagtgaccgcgaaggatgtcatcttgtcggtcatcggaaaatacggggtgaaattcggtaccggatatgtcattgaatacaccggggaagtattcagaaacatgtctatggacgaacgcatgacggtctgcaatatgtcaatagaagcgggagcacgggcgggactgatcgctcctgatgacacgacgattgaatattgtaaaaaccgtaaatacgcgccaaaaggcgaggaatttgaaaaagccgccgcagaatggaaagcgttaaaaaccgatccgggcgccgtatacgatcattccatcgtgttagacggcagcgagatttctccaatggtaacatggggcgtcaatcccggtatggttcttccggtcgatgcccaaataccggcgccggaaacgattgattctgaagacggtaaaaaagaagccatccgcgcgtacgaatacatgggaatctcaccgaatcaaaaaattgaagatattaaagtcgagcatgtgtttatcggctcctgtacaaattcgcggatgaccgatcttcgccaggctgcggatatgatcaaaggccgaaaagtcgctgacagcgtcagagccattgtggtcccgggttctcaaagcgtgaaacagcaggccgaggaagaagggctgcaccgcgtgtttctcgaggccggatttgaatggagagaatcaggctgcagcatgtgcctcagtatgaacaatgatgtcgtgcctgaaggggaacgatgcgcttccacttccaaccgcaacttcgaaggcagacagggaaaaggcgcgagaacacaccttgtcagtccggcgatggcggcaatggcagccattcacgggcatttcgtcgatgtaagaaagttttatcaagaaaaaacagttgtgtaaggagtgcgcgaaaagatggaacctttaaaaacacatacgggaaaagcggccgtcttaaaccggatcaacgtcgatacggaccagattattccgaaacagtttttgaaaagaattgaaagaaccggatacggcagattcgcgttttttgattggagataccttgagaacggtgagcctgatcctgaatttgaattaaatcgcaaagtctatgaaggcgcgtccatattaattgccggagagaatttcggctgcggatcatcccgtgagcacgctccttgggcgctggatgattacggcttcaaaatcatcattgctccgtcatttgccgatatttttcatcaaaactgttttaaaaacggtatgcttcccatccgtatgccgtatgatcagtggaaaaaactcgccggtcaatatgaaaatcagtctcttaacatgacggttgacttggaaaaccagctcattcacgacagtgaaggaaaagagatttcatttgaagtcgatcctcactggaaggaaatgctgataaacggctatgatgaaatttcattaacgcttctgctggaagacgacatacagcagtttgaatcgaaaagaagttcatggcttcaagcctgaaaaaagccgaccggcatctgtccggcggctttttttaccgtgcgcaccatcctttcttgtgtttcctgacgcgtgttgatacacttgaaaaaaatagcgcctgaaaggaaataaagtatgacgcatgacaagaaaaaagctgatatcattcctttcccccgtctgaaagaacgcttggttgataaagggatggccgccatgaaggataaacagtatcaggaggccctcgaactgttctcagaggcggtaagccacggcgataccgagtccgacgtacatttaggcatggcgatttgttttctggaactcggggaattggaagaagcaaaacaagtttgcgagaaaatgctgaatgaagggtacggccattatttcaccgtactgcaggtgtacatgaccattttaattcagctgaaacaatatgaagaagtcaaaagcacaattgaagctgtgctggaagaaaaccagctgcccgcagaaagtgcggagcaattctaccggctgctcgaattcagccgcaaaatgaccgatcccgatcagcaggatgaggcgtgggaggaggaatacgaggacattcttgatgcggaaaaagtgctgaacagccccgctgaacaaatgaatctgattcattctctcaaagaccgcaatattgcaaaatacacgggtctcttaaaaacaattcttcaagatccgggcgctcatcctcttatcaagacgatgattttgacgctgatggcggaccatgactacagcaagccggtccatattacaaaattcggcgattcaatgaccgcggttccgagtgaaacggttcagcctgatgcggctccgattttgcatcgcgttctccgggtgcttgatgaaacgctcggcaatgaaaaccctacattatacgctgccgtcgaggagctgtggagaaggcatctgtacgtcctgcacccttttatgccgaagtttttgaacgcagatttatgggcggcggcgcttcataaggtcggttacgagatgcacggcattgacattgagccggaggaacttcatatgatgtacgagtttgacagccgcgaacttgaagaagcctgcacgatgattaaggatattgaagaaatttcttatttgtaaatcacaccatatagttgaaagcggtaggcgttatgttataatatagtggttgtatttatgtatagcggtttaactgaaatgagaattacggttggacaggctgccagttcattacataatgattctgattcaaagcggttttttctttgacaaagccgcggattgctttagaatggaagaccgacacaacctgaatagatttttggagggaaacacatgtctgtaaaatgggaaaaacaagaaggcaacgaaggcgtattaacggttgaagttgatgccgatacgttcaaaacagctcttgatgatgcatttaaaaaagtagtaaaacaggtttctattcctggattccgcaaagggaaagttccccgcggtttattcgaacagcgtttcggcgttgaagctctttaccaggatgctttagatattttacttcctgtagaataccctaaagcggttgaagaagccggcattgagcctgtagaccgccctgaaatcgatgttgaaaaaatcgaaaaaggcgaaagcttgattttcactgcaaaagtgactgtaaaaccggaagtgaaacttggcgactacaaaggcttaggaatcgaaaaagatgacactgccgttactgacgaagatgtacaaaacgaacttaaagcgcttcaagagcgtcaggctgagcttgtcgtgaaagaagaaggcgctgttgaaaacggcgatacagtcgttcttgacttcgaaggtttcgttgacggcgaagcgtttgaaggcggaaaagctgagaactactcacttgaagtaggatcaggttcattcatcccgggcttcgaagagcagttaacaggccttgaagcaggcgctgaaaaggatgttgaagtaacattccctgaagagtaccacgctgaagagcttgccggaaaaccagctgttttcaaagtgaaaattcatgaaatcaaagcgaaagagcttcctgagcttaacgacgaattcgcaaaagacattgacgaagaagttgaaacgcttgctgaattaactgagaaaacaaaaaaacgccttgaagaagcaaaagaaaacgaagctgacgctaaattgcgtgaagagcttgttctgaaagcgtctgaaaacgctgaagctgatgttcctcaagcgatgatcgacactgagcttgaccgcatgctgaaagaattcgaacagcgtctgcaaatgcaaggcatgaaccttgagctttacactcaattctcaggccaagacgaaaacgcgttaaaagagcaaatgaaagaagatgccgcaaaacgcgtaaaatcaaacctgactcttgaagcgatcgctcaagcggaaaaccttgaagtaacggacgaagaagttgaagctgagctgactaaaatggctgaagcttacaacatgccggttgaaaacatcaagcaggcaatcggttcaactgacgcgatgaaagaagatttaaaagttcgaaaagcaattgattttcttgtagaaaaccgttaatatggttcataataatagacataataaaacagggcgcgattaattcgtgccttgttttgtacaattatgatataactctttttcttggggcaagatagtcattgccgggctgtttttcgtcatacatatagaatgtgcaagtgcgaaacacattgttaccgtcttactggaaagtatggtaaaatgcaatacatactcgatcgtagcaagaaccgttttcttttgcccttcaggtaaaagaaaaagtgagacaagattaaggggtgaaagaatgtttaaattcaacgaggaaaaaggacaattgaaatgctcgttctgcggaaaaacgcaagatcaggttcgtaagctggttgcaggaccgggtgtatatatatgcgacgaatgtattgagctctgtacagaaatcgtagaggaagagcttggtacagaagaagaagtcgaatttaaagacgttccgaagccgcaggaaatccgtgagattctgaatgaatatgtcatcggacaggatcaggcgaagaaatcacttgcggttgcggtatacaaccattacaaacgcatcaactccaacagtaaagtggatgatgtcgagctttctaaaagtaatatttctttaatcggaccgactggaagcgggaaaacacttcttgcccagacgcttgcgcgtattctgaacgtgccgtttgcgatcgcggacgctacatctctgactgaagccggatatgtcggtgaggacgtagaaaacatcctcctcaagctgattcaggcagcagattatgatgtggaaaaagcagaaaaaggcattatttatatcgatgaaatcgataaagtagcgcgaaaatctgaaaacccgtccattacacgcgacgtatcaggcgaaggcgttcagcaggcgctgctgaaaattcttgaaggaacggttgcaagcgtgccgcctcaaggaggacgcaaacatcctcatcaggaattcatccagatcgatacgacgaacatcctgttcatttgcggcggtgcatttgacggcatcgaacaaatcatcaaacgccgtctcggacaaaaagtcatcggcttcggctctgataataaagcggcagatctggaaaaagaagaactgctttctaaagttcttccggaagacttgctccgtttcggtctgattcctgaattcatcggccgtcttcctgtcattgcaagccttgagcagcttgacgaaacggcactggttgaaattctgactaaaccgaaaaacgcactcgtcaaacaatacaagaaaatgttagaacttgatgatgtcgagcttgaatttgaagacgaggcattatctgaaattgcgaaaaaagcgatcgagcgtaaaacaggcgcacgcggcctgcgttctatcattgaaggcatcatgcttgacgtcatgtttgatctgccgtcccgcgatgatattgaaaaatgtgtcattaccggagcgacagtcgcagacggtgaagcaccgcgtcttgtattaaaagacggcacagttgtcggccaagataaaacatcagcataacatgacaaaacctcctgactcgaattgatcaggaggtttttttcttgtcctgacccttctgaaaatgtttattccgggctttgctgggagatactagcggacagaggaatgaattggatacataaatcgttttttcaggagggaccagcatgagttggacagggatcgcattatttgtacagctgtttttcgggatagtcatcggattatatttttggaatctgctcaaaaaccagcgtacacaaaaagtgacgatagataaagaatcaaaaaaagaaatggaacagctgcgcaaaatgcgcgccatcagtttatcagaacctttatcagaaaaggtgcggccgaaaagctttcaggacattgtcggccaggaagacggaattaaagcgttaaaagcagcgctttgcggaccgaacccgcagcacgtcattatttacggtcctccgggagtcggtaaaacggctgcggcgcggctggtattggaagaagcgaaaaaacataaacagtcaccgtttcaaaagcaggctgtttttgttgaacttgatgcgacgaccgcgcggtttgatgaacgggggattgccgatccgcttatcggttcagtgcatgatccgatttatcagggagcgggagcgatgggccaggcaggcattccgcagccgaaacagggggctgtgacccatgctcacggcggggtattgtttattgatgaaatcggcgagcttcatccgattcagatgaataaaatgctgaaggtgcttgaagatcgaaaagtatttttagacagtgcgtattacagtgaagaaaatacgcaaataccgaatcacattcatgatatttttcaaaatgggcttccggcagatttccgtttgatcggagcgacaacgagaatgccgaatgaaattccgccggccatccgttcgcgctgtcttgaagtatttttccgcgagctggaaaaggatgaacttaaaatcgttgcgaaaaaagcagccgacaaaattcagaaagagatttctgacgaagctctcagtgtgctgaccacatatacgagaaacggacgtgaagccgtcaatatgatccagatcgccgccggcatggcggtgactgaggacagaaaagaaattacgacagaagatatagaatgggttgttcattccagtcagcttacacctaaaaatgagcagaaaatcgccgatgaaccgcaagtcggcatcgtgaacggacttgccgtctacgggccgaacagcggcgcattgctggaaatcgaagtgaatgtcacacctgcgcaggacaaaggaagcctgaatatcacgggaattgcagaggaagaaagcatcggcagccaatcgaagtcgatccgccgcaaaagcatggcaaagggatctgtggaaaatgttctgacggttctgcgcacaatgggcatcaaaccttcagactatgacattcacgtcaattttccgggcggaggcccgattgacggaccttcagcaggtatcgcgatggccgcggggattttttccgcgattcaccgcatcccgatcgaccatacggtggcgatgacgggagaaatcagcctgacggggcttgtcaaaccgatcggcggcgtcattccgaaaattaaagccgcaaaacaggccggagcaaaaacggtcattatcccatatgaaaatcagcagtccattctgaaacgaatagacggaatcaccattaaagcggtaaaaacgttccaggaagtgctggacgtcatattggttgaccctccttcagaacaaaaaccgtttgatatccaaatgaataaagaatccgtataaaccccatttttataatggggtttttttatggaggacatcttttcctttttcagaacagaaagaaagggtatactacgaagagactgttttatatacagggcaggcggataagccgattttgcccgatcccggaattgtacaacgatgaaaaagttgtattataatggttcatactaaagtcacggaggtgtcagtcacatggcagaagatacaaaacgcagcatcccgctcctccctttaagaggcttattggtatacccgacaatggttttacatttagatgtaggccgtgacaagtcggttcaggctcttgaacaggcaatgatgcatgatcatatgatttttttagccactcagcaggatatttcgatagacgaaccgggtgaagaggatattttcgccgtcggcacttatacaaaaattaaacagatgctgaagctgcccaacggtacgatcagagtgcttgtagaaggaattcagcgggcgcagatccttgaatacaccgaactcgaagattatacttcggtcgatatacagctgatgcatgaggatgattcaaaagacgtggaagacgaagcgcttatgcggacgctgctggaccattttgaccagtacataaaaatttctaaaaaaatctccgcagaaacgtatgcggctgtgactgatattgaagagcccggcagaatggcggatatcgtcgcttctcatctcccgctgaaattaaaggacaagcaggacattttagaaacggcggatattaaagaacgtctgaataaggtcatccgttccattcataatgaaaaagaagtgctggagattgagaaaaaaatcggtcagcgcgtcaaacgttcgatggaacgcactcaaaaggaatactacttgcgtgaacagatgaaagccattcagaaggagcttggcgacaaagaaggaaaaaccggcgaagttcagtcgctcacggaaaagatagaagaagcaggcatgcctgagcgtgtcaaagaaacggcgcttaaggaattaagccgttacgaaaaagtgccgtcaagctcagcggaaagctctgttatccgcaactatattgactggctcatcgcccttccgtggtcggatgaaacagaagataaacttgatattaaaaaagccggggaaatcttagataaagagcaccacggcttagagaaagtgaaagagcggattttggagtatttggccgtgaaacagctgacgaaaacgctgaaagggccgattctttgtctggccggacctccgggagtcggtaaaacatctcttgcaaaatcaatcagtacgagcatggggcgccgttttgtgagaatttcactgggcggagtgcgcgatgagtctgaaatccgcgggcaccggcgtacatacgtcggagcgatgccgggccgtattatacaggggatgaaaaaagccggtaaacaaaatccggtctttctcctggatgagatcgacaaaatgtcgtctgatttcagaggcgatccgtcttcggcgatgcttgaggtgctggatccggaacaaaacagcacattcagcgaccactatattgaagagacgttcgatttatcgaaagtgctgtttatcgcgactgcgaataaccttgcttccataccgggacctctcagagacagaatggagattatcagcctgtcaggctacactgaaaacgaaaagctggagatcgtgaaggaccacctgcttccgaaacaaatcaaagagcacgggctcacaaagagcaacctgcagattcgggaccaggcgattacggacatcatccgctactacacgagggaagccggcgtgagaacgcttgaacgccagattgccgccatttgccgaaaggctgcaaaagccattgtgtctgaggagagaaaacgcattaccgttacagagaaaaatctggccgactatctcggaaaacggatattcagatacggacaggcggaaaccgaagatcaaatcggggttgtcacggggcttgcgtatacgacggtcggcggagatacgctgtcaatcgaagtgtcattgtcaccgggaaaaggaaagctgattctgaccgggaagcttggagatgtcatgcgggaatcagcgcaggccgctttcagttatgtccgctcgaaagcggaacagttcggaatcgatccgaaattccatgagaagtatgacattcatatccatgtccctgaaggagcggtgccgaaagacggcccttctgccggaattacgatggccacggcgctcgtttcagcattaacggaccgtgcggtaaaacgcgaagtcggtatgacgggagaaattacgctgcggggccgcgtgcttccgatcggcggactgaaagaaaaggcgctcggcgcgcacagagcgggcctgaccactattattgcgcctaaagataacgaaaaagatatagaggatattccagaaagcgtcagagaaggactgaagtttatattcgtttctcacctggatgacgttttggaacatgccttagtaggagagaagaaatgaaagtcacaaagtcagaaatcgtgatcagcgcggtcaaacccgaacagtaccctgatggggggcttccggaaatcgcgctggcgggaagatcaaatgtaggaaagtcatcttttatcaattcattaatcaatcggaaaaacttggccagaacgtcatcaaaaccggggaaaacacagaccttaaacttttacatcatcaatgatgaattgcattttgtcgacgttcccgggtacggatttgcgaaagtttccaaaagcgagcgggaagcatgggggagaatgattgaaacctatatgacgacccgcgaagagctgaaagcctgcgtgcagattgtcgacctcaggcacgcgccgtctgctgaagacgtgaacatgtatgaattcctgaagtattacggcattcccgtcatcgttatcgcgacaaaagcggataagattccaaaaggaaaatgggacaagcacttaaaggttgtcaaacagacgcttgatatggatcctgaagacgagctgattttattttcctctgaaacgaaaaaaggcaaagatgaagcatggggagccattaaaaaaatgatcagccggtaataaaaaacccaaaacgcagtgcgttttgggttttatcgtatagttttgttccgcttgataaacaataataaaaggctgattccgatgaaaacatacggccagtatgttttgaagtgttccgtcggaatatggacggactccagccacgccgtaatttgtttaaagaagtataaaaagagggaaaaaccaatcatggcaaccgcttcgtatacatattcttttctggctgccgcaaataaggagaatccgaagacgaagagaatcatttcaaaatctcccggccaccatgagagctcaggtttggcgaaaaagtgtaaacctatgccgaaaagaagcatgccgatcaggacgtgaggcccggccgcttcctttttgccctgatacaagagcgcagcgcccaaaagcataaggagcaccggccattccccctgattcgcaaacaggtgaacctgtccgctctgaagccatgcgaataatgaagcggcaagcagaagtcccggtaataaaattgatgtttttttcatcctgtcacctacccgcagtaaaggatttttagtatgatgattacagtggaaacgagctttttatactatagcataacatttttgaaatctgttcacattttcccgaagaaactatgttataattattataaataataaattctatgttagaatgattataaataaattgcgatgtacgggggtgcatgaaagcgatgcatattcttgttgtgggagtagattataaatccgcccctattgaaatacgcgaaaaaataagttttcagccggatgagcttgcagaagcgatgcttcgtttaaaagaagaaaaaagcgttcttgaaaacattatcgtgtcaacctgcaaccgcaccgaaatatatgcggtggtcgaccagcttcataccggccgttattatataaaaacatttttatccgaatggttctcgctgccgaaagaagagctgtctccgtttctgaaattttatgagagcgacgcggcgatcgagcatttattccgtgtggcgtgcggcttggattccatggtcatcggagaaacgcaaatactcggccaggtccgctcgagctttaaaacggcgcaggcagaaaagacgatcggcaccattttcaatgagctgtttaaacaggcggtgaccgtcggcaaacgcacgcatgccgaaaccgatatcggcgccaatgccgtttccgtcagttacgccgccgttgaactcgcgaaaaaaatcttcggctcattgtcaaataagcacattttgattctcggtgcgggaaaaatgggcgagctcgccgcagaaaacctgcacggtcagggcatcggcaaagtaacggtcatcaacagaacgtttttgaaggcaaaagcgcttgctgaccgtttctccggagaagcgcgcagcttaaaccagcttgaacatgcacttgctgaagctgatattttaatcagttcgacaggcgcaagtgatttcgtcgtgtctaaagaaatgatggagagagcgggcagacagcggaaaggccgtccgttatttatggtggatatcgctgtgccgcgagacctcgatccggcgctgaacgatcttgaaggtgtttttctgtacgatattgatgaccttgaaggaatcgttgaagccaacttacaagaacgccgtgaaactgctgaaaaagtcgagctgttcattgaagcggcaattgttgagtttaagcagtggcttaatacgctcggcgttgtgccggtcatttcggcgctgcgtgaaaaggcgctgtccatccagtccgatacgatgcagagcattgagcgcaagctgcctcatctgacggtaagagagaaaaaacttctcagcaaacatacgaaaagcatcattaaccaaatgctgcgcgacccgattctgaaagcgaaagagcttgcggctgaagcggattcagatgaaaagctgaagctgtttatgcagatattcgatattgaggaagaggccggccgtcagctggacaaaagcctggataaccgccagacggttcattcgtttcaaaaggcagaagcaaaaacgggcttacgtccgcttgtaagtgagtgagggctgtatgattgatacagcaatggcaagacttaatgaagcgacaattgttatttatgcagtaagcgtccttttttactttatagattttcttcaacacaaccggaaggctgggaaaatggccttctggttgctttctattgtctggactctgcaaaccgtctatctttcttatttcatgtggcagacgggcagatttccggtcttgaatattacggaggccctttacttttatgcgtgggtgcttgtcacgctctcacttgtggtcacgcagattctgcgcgttgattttatcgtgtttttcacgaatgtcatcggtttctcgatgattgcgatccatacgttttcaccgacggatcagcattcggccgctttttccggccagctggtctcagagcttttggtcattcatattacaatggcgattctgtcttacggcgctttttccctttcttttgtcttttcgcttctttatcagtttcaatattctttattaaagaagaaaaagtggggaaaatggctgttgagaattgaagatttgtcaaaacttgattatatggcttacgttttaaatgtcatcggggttccgatgctgctgttgagcctgatattaggcgtgatctgggcgtatgtgtcgctggaaacgctgtactggtttgattcaaaagtgctcggctcgtttattgtgctgcttttatacagctactatttatatatcagattgattaaggaactgcagggaaaagtggcggcgttatggaattcagcatgttttctcgtgctgatgattaattacttcctgctcggaagcctgtcgcaattccattggttcagttaacgaacgcgcccaaacagattcgggaggaaagaaaatgagaacgattaaggtaggttccagacggagcaaactggctatgacccagacaaaatgggtgattaacaaactgaaggaattgaacccttcctataactttgaaatccgggagattgtcacaaaaggcgaccgcatccttgatgttacactgtcaaaagtgggcggcaaaggtttgtttgtcaaagagattgaacaggcgctgctgcatcaggagattgatatggcggttcacagcatgaaagacatgcccgccgttttgcccgagggtcttgtcataggctgcataccgaaacgtgaggacccgcgtgatgctctcatttcaaaagggcatcaaaagctggacgacataaaagaaggaggcatcatcggcaccagcagtttaagaagaagcgcccagattcttgctgaacgccctgatcttacaattaagtggatcagaggcaatatcgatacgagacttcaaaagcttgaaacggaagattacgatgctattattttagcggctgcgggactttcgagaatgggctggaaagatgatgtcgtatctgaatttctcgaaccggaccgctgtctgcctgcggtcggccaaggcgctcttgctattgaatgcagagagtcggatgaggagcttttgaagctgtttgcgcaatttaccgatgagtatacgcagcgcacggtggcagccgaacgggctttcttacacgcgatggaaggcggctgccaagtgccgatagccgggtatgcgtccgtcaatgaccgggatgaggttgaattggtcggtcttgtcgcgtctccggacggaaagacgatttataaagaaacagcggcgggacatgatccggaagaaatcggaaaacgctgtgcggcgatgatgtctgaaaaaggagccaaagcattaatcgacagtgtaaaacaggagctcgatcaggatggcaaatgaccttcctttacaaggaaagaccgtgcttgtcacccggaacaaaagacaggccgcaccgttccgaaaaaaagtggaggcgctcggcggaacggctgtttccgcttcgctgatcgcttttcaggaagcgctcccggatgaatgtgcggacagtctccgggaagacctttctgagccgggatggcttgtgtttacaagcgtaaacggtgtccggttctttttttcctatcttgatcgtcacggtcttgcgctttcgggacggaaaaaaatcgcagccgtcggtgaaaagactgcgcgcgccctgaaagagcggggagcccggacggatgcgatgcctgacgagtatgtggcggaatgtctggctgatactttaaaacggcacgcatcagctgccgaacccatttcagtgataaagggcaatttatcacgcgatgtcataaaagcggagcttgagccgcttggctatcaaataagggaatgggtgttatacaataccattcaggatgaaaaaggcatggacgagctgagacgggctgcatcccgctctcattttgattttattacgtttaccagctcatcggcggtgcatacgtttatgcacgcggtcggagacggagaaaaagcgtgggaaaacagcggtgcgagctatatcagcatcggccctttgacagagaaagcgctcttggaatacgggatctcatcccatgtgcctgacacttatacgattgaaggcatgctggacgtcatgtgcagcatgtcgggaaaggattgataatgatgaatcaaacatttaacagacaccgccgtttgcgcgcgaacgctgcgatgagagatttagtaaaagaaacacgtcttcacccctcagattttatttacccgttatttgtcgttgaaggactcgaaggaaaaaaagaagttccttccatgccgggggtttatcatgtatcactcgatttgttaaaggatgaaatggctgagctgatatcgctcggcattaagtcggtcatcgttttcggcgtgccggaagaaaaagacgcctgcggaacccaggcttttcatgatcacggcattgtgcagaaagggattgctgaaattaaaaagcattatcctgaaatgatcgtaatcgctgatacgtgtctctgtgaatacacggatcacggccattgcggggtcgtgaaagacggagaaatcctcaatgacgagtcgcttgaactgctggctcagacagccgtcagccaggccaaagccggcgctgacatcatcgctccttcaaatatgatggacggttttgtcacagtgatcagggaagcgctcgacaaagaaggattcacgaatattccgatcatgtcttatgccgtaaaatattcaagtgaattttacggtccgttccgcgacgcggctgacagcacgccgcagttcggagaccgaaaaacatatcagatggatccggccaaccgcttggaagcgctccgtgaggctgaatcagacgcggcagaaggcgctgactttttaatcgtcaaaccgtctatgtcatacttagatattatgcgtgatgtgaaaaaccgccatcacctgccgctggtcgcatataatgtgagcggggagtattccatggtgaaagctgcagcccaaaacggctggattaaagaaaaagaaatggtgctggaaattttaacgagcatgaaacgtgcaggagccgatctgattatgacgtatcatgcaaaagacgcagcaaaatggcttgctgagtaacgatttcatttgacgggagctgagacagatgagaagctatgaaaaatcaaaagccgcttttaaagaagcgcagaaactgatgccgggcggagtgaacagcccggtgcgcgcgtttaaatcagtcgatatggacccgatctttatgcagcgcggaaaaggatcgaaaatttttgatattgacggcaatgaatatatcgactacgtcctgagctgggggccgctcattttgggccacacgaacgaccgggtcgttgaaagcctgaaaaaagtagccgagaacgggacaagtttcggagcatctactgaggtggaaaacgaactggccaaattggtcattgaccgtgtgccgtctgttgaaatcgtacggatggtcagctccggcacagaggcgacaatgagcgccctgcgtctggcaagaggatataccggccgcaacaaaattttgaaattcgaaggctgttaccacggccatggtgattcactgctgatcaaagcgggatccggagtggcgacactcggccttccggacagcccgggcgtgccggaaggaatagcaatgaatacgatcaccgttccatacaacgacttggaaagcgttgcactcgcatttcgggagtacggtgaagatattgccggggtcattgttgaaccggtagcaggcaatatgggcgttgttccgccgcaggaaggctttttacaaggacttcgcgacatgacggaacagtatggcgcgctgctcatttttgatgaggtcatgaccggttttcgcgtggattataactgtgcgcaagggtatttcggcgtgacgcctgacttaacgtgtctcggcaaagtcatcggcggcggtcttcctgtcggtgcgtacggcggaaaagctgacattatggaacgaatcgcgccgagcggtccgatctatcaggctggaacattgtcaggaaatccgcttgccatgacagcgggacttgagacgttacagcagctcacacctgaatcttaccaagaatttgtgaaaaaaggcgatatgcttgaagaaggcatttcaaaagcagctgcagcacatggcattccgcacacgtttaaccgggcgggttcaatgatcggcttctttttcacaaatgagcctgtcattaactatgaagcagccaaatcatctgatttaaagctgtttgctaaatattataaagggatggctgatgcaggcgtatttctgccgccgtctcaatttgaaggattgtttctctccactgcgcatacaatggaggatattgaaaaaaccattcaagccgctgagaaagtgttccaggcgatcagccgctgatacagaaaagccgatgcaagcaagacttgtatcggcttttttcaatgcctccattatcatatttttccggattgcggcatacacctttagtgacatctaattgtatggattagatgaaaggaggatatgaacttgccgcataatcaccgattgcaattttctgttgaagaatcaatctgtttccaaaaaggacaggaagtttctgaattactttcgatttcattagaccctgacatcagggtgcaggaagtaaatgattatgtctcaattaaaggatcattagaacttactggcgagtacaacatagatcacagcagtcattttgaagagcttgacagggagctgaggcatgtagaggaagtgagggcgagggaggatggcacggccgagctcattcattgtttcccggtggacatcacgattccgaaaaataaagtgagccacctcaatgatgttttcgtatttatcgatgcctttgattatcagctgacggattcaaggatcttaaccattcaagctgatttggcaattgaagggctgcttgaggaatccgagccaaaagagccggagatccctctgtacgtggcacctgaatttgccagagaagaaatgatcaatcttgccggacatcattcggaggacgaaaacgaaccagaattaatgatacgccatgagcctgaaatacctttgagtgtatcaaaagaagcagcacaagaaaccgagaagaacgaggaagaaaccccgcctttactcaggcaggaggaagaagagcaggaagcagccccgattctgagggagcgggaagaagaagagcaggaagctgccccgcttctgagggagtgggaagaagagcaggaagctgccccgattctgagagagcaggaagaagaagagcaggagactgccccgcttctgagagagcaggaagaagaagagcaggaagcagccccgattttgagggagcgggaagaagaagagcgggagactgccccgattctgagggagcgggaagaagaagagcgggagactgccccgattctgagggagcgggaagaagaagaggagcaggaagctgccccgattttgagggagcgggaagaagaagaggagcaggaagctgccccgattttgagggagcgggaagaagaagagcaggagaccgccccggttctgagggagcaggaagaggtgccgaaacctgtttcctttactgagcctcctcctcccgtttccttccaacaagaagaagagccggaagaagctgaggagcctgcaatcatgtcgtctgtgaggaatgaacctgtatttgaggatgattcagcagaagtgcaggaagagccaaaagatgataacgagccggttttccctgcgttcactctgactccgcatgcagaaaaaccaaaaattgcggaacagcccttccttcaaaaagaagagcagccagaggccgagccgcttctccgtcagagtgatcatgaggcggcagaagacgaagatgagcctgcggtttttcaagaagagcaggcgcccgtttatcgcgagttcgttccggaacggcaggaagaggagttttacagcgctcctaagctgcttgaagaagaggctcatgatgaagaagggtttgaaattgaggtaaggaagatggcgcagccggaggaggaaaccggaaagcctctcgatttgtcttttcagttttccaaactgccgcctgaggagccggcgcaagctgaaccgcctgagccgcttaagtctgaaagaaagaatgaagaagcggcaccgggaaccgagcagaaggaaaatgacaactctcattacttgacaaaattatttacaagggaagaagaaaagttttcaagaatgaaaatttgtatcgtacagcagcaagatactatcgaccgggtgtgtgaacgatatgacataacatcccagcagctcatcagaacgaatgctttatcgtttgatgacgagcttgaagaaggtcagcttctgtatatacctgaatataataacagccatgcgtaagcacaaagaggccgtaaaaatgtggtgaatggaatggaagcagtccaatcagtgcttcaggaatacgggctggcggctgagtatattgagcctgtcagcccgcatgtttggaaggtctactcaaactacggcatttttgctttgaaacagctcaagccggcccgcagcagtgaatttacggatcttatgattgagattgaggagaaaggctaccgatcatttgtgccgatctgccgcacgtatgccggcgatttttttgcgggaagacagacggagaattcttattatttaatgccttggcttcagtacgatcaggaagaggaacgggatcaaaaacatgtttacctttttaaagaggtcgcgaagctccactccgcgactgtgcgggacatccaaatccggactgaagatatcagcggcttttatgaagcaacgaaaagagattgggaaaatgataagcttgtctatgaacaattcgccgaccgggcggaaaaagagtggtatctttcaccttttgaactgcaggctgttacgtatcttacagaaacggtttctgccgtcaattttgctctcgaacgtctggaagaatggtttgacgcggcaaaggatcatgacaagacgagagcggtgatcaaccacggcagcttatcgagccgccactttctgtataatgatgcgggatcgggctttttcacgaatttcgagaaagctgcgctgggccctccgcaaaacgacctgctcggcttttactccagaatgttcagaagctatccgaaagcatgcccggaatgtctggactggttttatacgtatcacaaatcattcccgctccgtgaagcggaaatcagtctgtttctcagctatatggcttatccgtccgccatgtacaaagtgctgaaacggtatcagaccggccaaaggggctctgaaaaagaagagtgcacgcaattattaagagcgttttggcagatgaaaaatgttgagccttttctcatgaaggttcatcagattgagcgggagaaaaaaataaaagcggaaaacgagtcctcttcataacgggactcgtttttttatatccattccaaatgcagggcgcacgctaaaaacagcaggatggcaagcagcaggacatcaaaagtcgtcggaaagaaaatcgtcctgatcccctgaaagatcgtaatcgggataatgacttgcacggatacaaggcggacctgtctggcccactgggggagcgaataagaattgaatttttttctcacgggcaattcctcctcacattcgcctttctatgtatcgtatgtaagggaaagggcggggtgcatgcccatttatgtatgaccgcagcggtttttggaaaagatgattgacgaatcaaaaacacttttactataataaagaacataataaataaaatcatgagctgatataaatacacctgctttgaacgggaagagtacaagaaagacgcatgaagagagagaagctactgtgctgaaaggcttcttatgccgtctcattggaaggtcgcccgggagcataatttcttgaacatacagtagagaaattcgggccgcacccgttatccgtttaagtgcatgaacaaatctgttcatgaaaaaaggtggtaccgcgaaagagcttttcgtcctttatcaggatgaaggctcttttttagttgctcagccatttctaaacatgctggagggttatcatggatacaaacgaacaaacaatgccgacaaaatatgatccgtctgcgattgaaaaaggccgctatgatttttggctgaaaggaaaatattttgaagcgggcggcgatcaaacgaaacagccgtattctgtcgtcattccgccgccgaacgtgacgggcaggctgcacctcggacatgcgtgggatacgacgctgcaagatatcgttacgcgtatgaaacgcatgcagggctatgacgtgctctggcttccgggcatggaccacgccggcatcgccactcaggcaaaagtcgaagcgaaactccgcgaacagggcacaagccgttatgatctcggccgtgaaaagtttttagaagaaacgtggaagtggaaggaagagtatgctgatttcatccgcagccaatgggccaagatgggactcggactcgattattcacgcgaacgttttactcttgatgaagggctgaacaaagccgtgcgggaagtattcgtcaagctgtacaaaaaaggcttgatttacagaggcgaatatatcatcaactgggaccctgccacaaaaacggctttatccgatattgaagtaatttacaaagacgtacagggcgcgttttatcatttgcgctatccgttagcagacggttcaggcttaattgaaatcgcgaccacccgtccggaaacgatgcttggcgacacggctgtcgcggttcatcctgaagatgagcgctacaagcacttaatcggcaaaacggtgattctgccgattacaaaccgcgaaattccgatcgtcggcgatgattatgttgatatggaattcggatcaggggccgttaaaatcacgcctgcccatgacccgaatgactttgaactcggaaaccgccacaatttagagcggattctcgtcatgaatgaagacggaacaatgaatgaaaaagcgctgcaatataacggcatggaccggtttgaatgccgcaaaaaactcgtcaaagatcttcaggaatccggtgttctctttaaaatcgaagaccatatgcattctgtcggacatagtgagagaagcggcgccgttgttgagccgtacctgtccacgcaatggtttgtcaaaatgcagccgctggccgatgctgcggttgaccttcagtcaaaagaagagaaagttcacttcgttcctgaccgtttcgagaaaacgtacctgcactggatggaaaatatccgtgattggtgtatttcccgtcagctgtggtggggccaccgcatcccggcttggtatcataaagaaacaaaagaagtgtacgtcggccttgaggcgcctgaggacagcgaaaattgggaacaggattcagacgtgcttgatacatggttcagctccgcgctttggccgttttctacaatgggctggcctgatgaaaacgctgaagactttaagcggtattactcaaccgatgttcttgtgacgggatatgacatcattttcttctgggtatcccggatgattttccaaggtcttgagtttaccggtgagcgtccgttcaaagacgtgctgattcacggcttaatccgtgacgagcagggcagaaaaatgagtaaatcccttgggaacggcgtggacccgatggatgtcatcgacaagtacggagcggattcactgcgctatttcctggcaaccggaagttcaccgggacaggatctccgtttcagctatgaaaaagtggaatccacatggaacttcgcaaataaaatttggaacgcctcccgttttgcattaatgaacatggacggcatgacgtatgacgagcttgatctgtccggtgaaaaatcagttgctgataagtggatcctcacaagactgaatgaaacgatagaagacgtaacccagcttgcggatcgttatgaattcggcgaagtcggacgccacctgtacaactttatctgggacgatgtgtgcgactggtatatcgaaatggcaaagcttccgctgtacggggaagatgaagcggcgaagaaaacaacccgttctgttctggcatatgtgcttgaccagacgatgcgtcttcttcacccgtttatgccattcttaacggaagaaatctggcagcaccttcctcatgaaggcgagtcaatcacgatcagctcttggccggttccggtgccggaacatacggataaagaggcagcggcggatatgaaactgctcgttgaattaatccgttctgtccgcaatatccggagcgaagtcaacacgccgatgagcaagcaggttgagctttacattaaaacagctaccgaagacattgccggccgccttgagaagaaccgttcttacgttgaacgctttacgaatccgagcacgctgaaaatcgggacggatatcactgcggcagacaaagcgatgacagcggtcgtcaccggagcggaagtcattctgccgcttgaagggctgattaacattgatgaggagatcgcccgtctgcaaaaagaattcgacaagctgacaaaagaggtcgaacgcgttcagaaaaaactcggcaacgaaggattcattaaaaaagctcctgagcatgtcattgaagaagaacgcggaaaagagaaagactacacggcaaaacgcgaagctgtccggcagcggattgcagagctgaaaggctgataaaacagcggggcggtttcctaagaaaccgccttgtcgtataaaagaggggatttcattgtttaatacgtacaaagaagcgatcagctggattcacggcagactcaagttcggcgttaagccgggccttctccgtatggaaaagctgatggaaaaactggaacacccggaaaagaacattcgcgccattcatgtggcgggcacaaacggcaaaggatcgaccgtcgcttttatccgttccgtgcttcaagaagccggttatacggtcggcacgttcacatcgccttacattattacgtttaatgagcgtatcagcgtcaacggcacgccgatttctgatgaggaatggagaacgctcgttaatgacataaaaccgatagtcgatgagcttgataagaccgatgccggaacggtgacagaatttgaaatcattacagcgtgtgcatttttatattttgcgaagcgggctgatatcgattttgtcatttttgaagcggggctcggcggcacatttgattcaaccaatattgtgaatccgctcctgtcggtcattacaagtatcggacatgaccatatggcgattttaggaaataccatcgaggagatcgccgggcagaaagccggtatcattaaaaattccattccggtcattacgggcgtcaatcagccggaagcactcggcgtcattgaagcggaagccgaaaaaaagcaggctccgtatcagtcactatataaaacgtgcagactgtttaatgaagcggcgcttccgtccggtgaaagcttttcgctggaaacggaaacgaaatgctatgaaaacattcaaacgtcgctgatcggcattcaccaaagacagaatgcggcattggcgatattggccgctgaatggctgaatcgcatggaagccgcagccattactgaagaagcgatacgaaacggcctgaaaaaagcatcgtggccgggccggtttgaacgtcttcaaagccgccctttagtgtttgcggacggcgcgcataacgaagagggcgttgaaacgctgacagaaacgatccggcagcgctttgccggtaaaaacgtccatgtggtattcagcgcattaaaagacaaaccgtatcaggaaatgattaaaaagcttgaaaccgaagcggattccattcactttgtatcatttgactttccgcgtgcttcaagcgccgaagccctttataacgcaagcagtctagcggataagagcttcgatgagaacccggacagtgtgaaagaatggatagaacaaaaagacggggcggatgatgtcatcatcattaccggctccttatattttatttcagaaatgagaaagcggcttatctgacagcccctcggatgcccggcggaccattttacggttttgccgggtgtttttatgctgaaaatatattttcagccatttcagtcatggtgtttttctttgctataatctgagccagattgataagtaaaggtgtggtctgagtgcttttaattctgttttttctcggcttgattttcggttcttttttttatacagcagcgtgccgtatcccgcttcgaatttcggttatttcgccgcgttcagcctgttcgttttgccgcttgccgctctcttggggggagcttgtgcccgtcgtttcctatattctgcaaagaggcagatgcagaaactgccgtgcaaagctgtcggttatgtatccggcggcggaatgctggacggcgtgtttattcacggctgcaggcattcatttcggtttctcaaaagaactgttagtcgcgctgttatttctgtctctgctcatgattgttaccgtgacggatctgcaatatatgctgattcctgacaaggttctgctgttttttcttccgctttttatcgccggccgtatgttttctccgctggattcatggtatgcagggtttgccggagccgtttgcggattttttctgcttgtttttatcatgtttgtcagtaaaggaggcatcggcgcaggtgatgtgaaactgtttggggtgatcggcctgacgctcggcgtgaagctcgtgctcattgcattctttctttccgttatgatcggagccgtatacggtatgtgcgccgcagcccggggcaggcttggtaaaaagcagccatttccgtttgcgccggccatctcagccgggagcgctttgagttatttatacggtgaagagctgttttcgttttacatcaagctcgcttcaggcggggcttgaaaaatttggcgaacgttttttggacaagacgacaaaagtcttgttcttttttttttcgcctatgctaaagtgtgaaccatgatcagttcaaagtacggccaagacgaatgcaagggggaagagacgttgaaaaaaaggaagagcaaaaagcacagcaacgcaaaaaacaatgcccttaaagtaaccattaacggacaagaagaaacgatgtatggacaagaagatgtgaaagaaggcggggagaaaaccgtcacattttcaaattgggaagaaacaaaaaaggcggagcaggagaccgctgcatcccatgaagatccgaaagaagaagatttcaattgggatcatgagaagaattctgaggtatttgaagatgacccgaaagtcgttccgccataccagaagaaaaaaaacggccctcattttccgaaaaaaaagcagccgtcttctccagttaaaaaagcggtcacgacaattgctgttgcggctgttttaggcaccgggctcggccttgtcgccttaaatatgtcgggaagtaaagaagcctccgctccagcatcagctgacaaaggttcacaagggcagacggcgaaagcgggagatgtttctaaagacaaatctgaaacagccggcacaggagatgcggaatcttcagagggaaactataaaacatatgcggtgcaggccggaaaattttcatcagaaaaaggagcgcaaacccttgttgaccagctgactgaaaaaggatactcggccgtctctctggctaaagaagacggatacacatacgtgatcgccgggcttgcagcggaaaaaagcctatcacagcaattgggtcagacactgatagaccatgattttgaggcttggggcggaaaagagctcagctttgcggtcgattcaggactggaagactcttttaaacaagcatctgagctctccgccaaagcgattaccggcaaagatctttcaaaaacggaagtggctgaagcggcaaaagcggcagacggtgcagacgccgctgacaaaaagcagaaagaggccgtgcttcaagcgctgaaagaactggaaacgccgggttcggaatccggctggaaagcccaaaaagagcttttaagtgttgtaaaatagtatctcatttcccgtcatccggcgggattttttattttgtcatcaaaaagttatttttctgaaattgtggttgcccgtttgatttggtaggatagacaagtatctttttttcttaagcaaaccctgaaaggatgacaatcatgacaaaacgcttaatactcgcatcacaatctccgcgaagaaaagaactccttactcttcttcagattccttacagcattattgcaagccgcacagaagaaaaattaaatcgaaacctttcgccggaagaaaacgtccaatgtttggccgagcaaaaagccggtgctgtattggccgaaaatcccgatgcagtcgttatcggggctgacacgatggtgtgcatagacggcgaatgcctcggcaaaccgcatgacagagaagaagcggcacacatgctgcggaggctttccggccgaagccatcaagtcattacggcggtcagcattcagacgcatgaccggaaagaaacgttctgtgacacgacggaagtgacgttttggccgctcagtgaagacgacatacagctctacattgaaacaaaagaaccgatggataaagcaggtgcatacggcatccaaggaaaaggcgcgcttttagtgaaaaaaatagacggtgatttttattctgtcgtcgggcttcctgtcgctaaaacaatgagagccttgaaagaatttaatataaaagcttgatgttcaaaccgggaaggggaacaaggaggggttgatcatccgtgatctgccgttaaaattaagagatttccccgaaaaagaaaaaccgagagagcggcttctgcacttcggagccgaacatctctctaacaatgaattgctcgccatcctgctgcggacgggaacgaaacatgagtccgtcatgaacctcgctcaccggctgctgcggacgtttgacgggctgcgactgttaaaaggcgcctctgcccaggagctttccagcattccgggaatcggcacggtgaaagccgttcagattcttgccgcaattgagctggggagccgcattcataagacatccgccggggagcattgcgtcatccgctctccggaagacggggcgaagtatgtgatggaggatatgcgctttttatcccaggagcattttgtctgtttatatttaaataccaaaaatcaagtcattcataaacgcaccgtttttatcggaagtctgaattcatctattgtccacccgcgggaggtgtttaaagaagctttcaaacgatccgccgcgtccttcatttgcgttcacaatcatccttcaggagatcctacaccgagcagggaagatatagaggtaacccggcggctttttgagtgcggaaatttaatcggcatcgagctgctggatcatttggtcattggtgacaaaaaatttgtgagtttaaaggaaaaaggatatttgtaacactttttttttcgttgatttaagatataatagattttatgagtttttccctttagggtatttttgctttaagaaaggaagatacatacatatgttcggaattggtacaagagaccttggtatagatttgggaaccgcgaatacgcttgtgtttgttaaaggaaaaggaatcgtagtgagagagccgtctgtcgttgctctgcaaacggatacgaagtccatcgttgcggtcggtaacgatgcgaaaaacatgatcggaagaactccgggcaacgtggttgcgctccgtccgatgaaagacggcgttatcgctgactatgaaacaactgcgacaatgatgaaatactacattaatcaggctgtgaaaaataaaggattgtttgcgagaaagccttacgttatggtgtgtgtgccgtcaggtattacggccgttgaagaacgggcggtcatcgacgcgacaagacaagcgggcgcacgtgacgcttatccgattgaagaaccgtttgcagcagcaatcggcgcgaatcttccggtatgggagccgacgggcagcatggtcgttgatatcggcggcggaacaactgaagtggcgatcatttctttaggcggcattgtcacgtctcagtcaatccgcgtagccggtgacgaaatggacgactcaatcatcagctatatcagaaaaacatataatctgatgatcggtgaccgtacggcggaagccattaaaatggaaatcggttcagcagaaaccggtgaagaaaatgcgtcaatggaaatccgcggccgcgatcttctgacaggtctgccgaaaacgatcgaaattacgggaacggaaattgcaaatgcactgcgtgatacagttctctcaatcgttgacgcggtgaagagcacgcttgaaaaaacaccgcctgagctggccgctgatattatggacagaggtattgtattaacagggggaggcgccctgctccgcaatctcgacaaagtcatcagcgacgaaacgaaaatgcctgttcttatcgctgaagatccgctggattgtgttgcgatcggcactggaaaagcactggagcacatccatcttttcaaaggaaaaacaagataatcaggagttaaatagaagaggtgtatcacgatgccgaacaaacggttaatgctattacttctgtgtattatcatattggtggctatgattggattctcgctgaagaacggccgtaataccacctggcctgaaaagctgatcggtgatacgacgggagtatttcaaaacatttttcacacgcctgccgaatattttgcagggttcttcggggacataaaagacctgaaaaacacgtacaaagaaaacgaacgcttaagacaaaagctggacggacagacacaatatgaagcgaagctccaagaactcaaagatgaaaacaagaagctgcgtgatgaactcgggcatgtcaaatcaatttccgactatgatccgattttagcgaccgttatcgccagaaaccctgatcaatggtacaagcagatcatgatcaataagggaacgaagcagaaagtggccaaagacatggctgtcacgaacgaaaagggtgcgctggtcgggaagatcaaaagcagcggactcaacagtttcacatccgccgttcagctgctgagcgatgttgaccgcaataacagagtggccaccaaaatctccggcaaaaagggaagcaaaggctacggtttaattgaagggtatgataaaaagaaacagactctgaaaatgaccatccttgagccggatgaaaaacgtgaagtgaaaaaaggcgacctcgtggagacatccggaacgggcggcgtatttcctcaagggctgacggtcggggaagtgaccgatgtagaatcagatgcttacggcctgacgaaaatcgcttacgtgaaaccggctgccgacttgtacgatcttgaccatgtcatcgtcgtgaaccgaagcgtagcaacaggggaggaaggatcgtgaaacgtttccttctccctttgattatgattttggtcttttgtgcggaaagcatctataccgatctggtgcgttttcctttcgtttccgtcgagcagcaggtcgttccgcattttcttttgcttgcgctgatttttatgtccgcttatatcaaccaaaagcatgcggtgatctacggtttgattttcggatttctttatgacatcaattatacgggtgttttaggcgtttatatgtttggttttgccggtttatgctatctggcggccaaagcgtttaaagtgctgcagacaaacgccctgatggtcattctggtcgcggtgctgagcgtatgtgtgcttgaattttacgtctacggcattcagacgttaatccgcagcggcacaatgacatttaacgattttgtcattcagaggttcttgccgaccgctttgctgaatattgcgggagccgttatattagtcctgcccttcaggctgttttatataagtctgaagaaagaattaagagatgagtaaaaaggattttatctttttttgacgaaaagagtatgttgttgaggtgaacattgatgaagaccaaaaagcagcaatatgtaacaataaaaggaacaaaaaacggcttaacattgcatctggatgatgcgtgttcttttgatgagcttctcgatggtcttcaaaacatgctgtcgattgaacaatatactgatggcaaaggccaaaaaatcagtgttcatattaaactcgggcatcggtatctgtatcaggaacaggcagagcagctgactgatctgatcgcgtcaaagaaagatttagtcgtgcattcaattgacagtgaagtcatcgccaaagaagaagcgcagcggatgaaagaggagcaggaaattgtttctgtttccaaaatcgtccgttcgggccaggtgcttcacgtgacgggagatttgcttttaatcggagatgtgaatcccggcggtacgatcagagccggaggaaatatatttgttctcggttcattaaaagggattgcccacgcgggttataacggaaataaccgggctgtgatcgccgcatcagaaatgatgccgacacaattgaggatcaatcacgtgttaaatcgctccccagaccacattcaaaaagggaacgacatggaatgtgcttatttagatactgacggaaatatggtcattgaacgccttcagcaattggctcatttaagacctgatctaacaaggcttgagggaggaatgtgaaattgggtgaggctatcgtaataacttcgggaaaaggcggagtaggtaaaacaacaacatctgcaaacctcggtaccgccttagccattttagggaagcgcgtctgtttggtggacacagatatcggactgcgcaaccttgatgtcgtaatgggtcttgaaaacagaattatttacgacttagtagatgtaattgaaggcagatgcaagacgcatcaggcgcttgtcaaagacaaacgttttgatgatctgcttcatttaatgccggctgcccagacaagcgacaagacggctgttgtccctgagcagatcaaatcgcttgtgcaggagcttaagcaggaatttgattatgtcattattgattgtccggccggaattgaacaaggctataaaaatgccgtctccggagctgataaggcgattgttgtgacgacgccggaaatatcagcggtgcgggacgctgaccgcattatcggacttttggagcaggaagatatcgaaccgccgcgccttatcgtgaaccgcatcagaaatcatctggtgaaaaacggtgacacgatggatgtggatgaagttgttcatcatctgtctattgatctcctcggaatcgttgctgacgatgatgaagtgatcagggcttcaaatatcggcgaaccgattgccatgaattccaaaaaccgcgccagcattgcgtaccgcaatatcgcccggcgcattttaggagaatccgttcctttgcaggtgcttgaagagcagcaaaaagggatgatggcgaaaatcaagtcatttttcggcgtgcgttcataatatataccagaatacaaagatctgatgaagcccagcttatcaggtcttttttgtttttcaagagcgcatatttgcaatggacaagacataggatgtacaaacccaacgattgcaaaggatgatggcgatgagtcacagagctgatgaaattagaaaaagactggccaaaagaagaaaacagtggcctgaatcaaaacggactttcgttcaaaacgcccaaacgcagaattttcccgcgtggcagacggtcaaggagcaggaaaagcacaagcttctaccggactacgaatatcaaacggaacacccgcccgaatttaacggacggcatccattgatcagtgctcattctattattttaaaatgcctgctggccgcctgtctcgtactgatctccgctattgcctataaaactgacaaacagccgctgagtcagatcaaaccggcgatcgcacaaacctttcaaaaagaatttcagtttgctgccgtaagcaattggttcgtatcttccttcggaaacccactcgcttttcttacgccgggaacgaaaaagaaggacggtcaggtggcggtcagtcaggatatggccgttcctgccgcggggaaaatccagcaggactttcaaaataacggagaaggcgtcgtcgtcgaaaccgccagcgaagccattgacagcgtaaaagaaggctacattatggaagtgagcaaagataaaaaaacaggactgacggtgaaggtgcagcacgccgacaataccagcagcatttacggccggctaaaagatgttaatgtttcattgtacgactttgtcgataaagggaaaaagatcggttcgatcaagctcaacgataaaagtaaaggccagtactatttcgcgatccaggatggcgataaattcatagatccgatccaggtgatcacatttgatgaataaatggctcatcctcctttttaaaattcatgtccatccttttctttggattatcatggggcttggtcttatgacggggcacatcaaagcgctgctgtgtcttttgctggtcgtatccgttcatgagctggggcatgctgctctggctgtgtttttttcgtggcgcattaaacgcatctttctgctccctttcggcgggacggttgaggtggaggagcacggaaaccggccgcttaaagaggaattcgcggtcattctggcgggcccgcttcagcatgtgtggcttcaggcggcagcctggctctttttcatgtcaggctttgcaagtgagcagacatttgagatgtttaccttttataatctctccattcttttcatcaatcttttgccgatctggccgcttgacggcggaaagttcgtgtttttatacttctctaaacaaatggcttttcaaaaagcgcatctcctcagcctgcagacatcggctgtttccgcgcttttgctctgctgctggattgtgctggccgtcccccttcagatcagcgcatgggtgctgttcgtctttctcgccgcttctttatgggatgaataccggaagcggcattatattcagctgaggtttcttttggagagatactacggcaaaaaccgcgatgtcgccatgctgcatcctttgacggtcgcggccgatgccaaagtaaagcatgtcatggccgaattcaaacggggatgcaagcaccccattatcgttgaaaaagccggcgaaaagctcagccagctcgatgaaaatgaagtgcttcatgcgtattttgccgataaacggacagattcctctatggaagacctgctgctgccttactagaaatagattgacatatccttttggttctgatatattttttaatgttatggatgtagcaccaatgctacaaccgctcgggacaggtgataagagctttaaagccccctgttgctggcgagtcttagtctaataggaggtgcagagaatgtacgcaatcattaaaacaggcggaaaacaaatcaaagttgaagaaggtcaaactgtttacatcgaaaaacttgctgctgaagcaggtgaaacagtgacgtttgaagacgtattgtttgttggcggagacagcgtgaaagtcggcaacccaacagttgcaggcgcgacagttacagctaaagttgaaaaacaaggccgtgcgaaaaaaatcactgttttccgttacaagccaaagaaaaatgttcataaaaaacaaggtcatcgtcagccttatactaaattgacaatcgaaaaaatcaacgcgtaagcatgattgaggcaacaattcgaagatcccggaatgacgggggcatattgtcctttgaaatgacgggacatgccgattttgctgaacatggacgagatctcgtatgcgccggggtcacggctgtcgttttcggagcggtcaatgcggttatcgcgctggctcctctcgaaccgattcttgatataggcgaggacgggggttatttctactttgaattccctgaagccgctgatcaggaagctttgcaaaaagcgcagctgctgattgaaggcatgattgtttctcttgaaacgatcgagcgggattacagtgaacacttacggttgactgcaaaccaaatataggaggtgagttacatgcttagattagatcttcagtttttcgcttctaaaaaaggtgtaggttctacaaagaacggacgtgactctgaatctaaacgtttaggcgctaaacgtgcagacggtcaattcgtaacaggcggatctatcctttaccgtcaacgcggaacgaaaatctacccaggtgaaaacgtgggccgcggaggagatgacactctttttgctaaaatcgacggaactgttaaattcgaacgtttcggccgtgaccgcaaaaaagtgagcgtatatcctgtagctcaataatgacacaaaaaactccggtcgttgactggagttttttttgcagtaagcggagtaacatcaagaatgaaaagcagaggatgcgtgagtgaaccccgccttgaatgaggacatcagcttcccatacccactggatatgttccccaagcagtgataccaaaaatgtttctgcctggcatccgcattgtatgcgatccgaaaaaggaacatgatgaaccaggaaaaacaagtgtttttttaacaaagccttctctgttataattcatagtacacacttatcaagactcctaaaaagaaattaaacgattgggagtgcgaaaatgaaggatgtatcgaagaaacaagaagaacctgtaagcgatgcggctctgatcaatgagctgatccaattaatgggccatttccgtcatgattggatgaataagctgcagctgataaaaggaaacttaagtttgcagaagtatgacagggtcgttgaaattattgacgaaatggtcatagatgcaaagcacgaatcaaagctctcaaacctgaaaaccccgcacttggcgtttgactttcttacatttaattggaagtcccgttatatgaggctcgaatacgaagtgctcggagaaattaaagatttatcggcatatgatcaaaagctgtcgaacctgatgagaaaactgtttcatctgttcggtctggcggtaaacaatgaaagtgaaaatcatctgaccgtatcgctgcagacggatcaccctgacagacagcttattgtatatctcgattttcatggaacgattgcaaatgcagatgtgtttgatgaatttcgcaaatcccggcatgaggactttgatgtcatgcaatttgagctgaccggccatgaatgtgtggccgaaattggaatgaactagcggttttttacggtttagaacggaggatattatgtttgtagatcaggtgaaagtatatgtaaaaggcggcgacggcggtaacggaatggttgcgttccgccgtgaaaaatatgtgccgaaaggcgggcctgccggcggtgacggaggtaatggaggcgacgtcgtttttgaggttgatgaaggactgcgcacgctcatggacttccggtaccagcggcatttcaaagcgatacgcggcgagcacggcatgtctaaaaaccagcacggcagaaatgcggacgatatggttgttaaagttccgcccggcacagtcgtaacggatgacgatacaaaacaggtcattgccgatctgacagagcacgggcagcgcgccgtcatcgcaaaaggcggacgcggcggacgcggaaatacccgctttgcaacaccggccaacccggcaccgcagctgtcagagcacggagagcccggaaaagagcgctatatcgtgcttgaactgaaagtgcttgcagacgtaggtctcgtcggcttcccgagcgtcggaaaatctacgcttctgtctgtcgtttcatcggcaaagccgaaaatcgccgattatcattttacaacgcttgttccgaatctgggcatggtggaaacggatgacggaagaagcttcgtcatggcggatctgcccggcctgattgaaggagcgcacgaaggagtcggcttaggccaccaatttctccgccatatcgaacggacgcgcgtcatcgttcacgtcattgacatgtcagcgatggaaggccgtgatccgtatgaggattatgtcaccattaatcaggagctcagtgaatataatctgcggctgacggagcgtccgcaaattatcgttgcgaataaaatggacatgcccgaagcggctgaaaatcttaaagcgtttaaagaaaagcttcaggatgatcaccctgtctttccgatcagcgctgtgacgagagaagggctccgcgatcttctgtttgaagtcgccaaccagctggaaacaacgcctgaattcccgctgtatgatgaagaagaactggcggaaaaccgcgtaatgtacacgatggaagatgaagaaattccatttaacattacccgtgatccggacggcgcgtttgtgctttcaggtgacagtctggaacgcctctttaaaatgactgacttctcccgtgacgaatccgtcaagcgttttgcaagacagatgcgcggtatgggcgttgatgaagcgctcagagaacgcggtgctaaagacggcgatatcatccggcttctggaatttgaatttgaatttattgattaaaaaaacggagagcttgcgttgcaggctctctgatgtaaaagggaggggtgcaggtgaaagaagagacattttatttagtgcgtgaagacgttctgcctgatgcgatgcggaaaacccttgaagtcaaaaagctgctcgacagaaaaaaggctgaatcggttgcagatgccgtgcagagagttgatttaagcagaagcgctttttacaaataccgagatgcggtttttcctttttacacgatggttaaagaacaaataatcacacttttctttcatttggaggatcggtcaggcgcgttatcccagcttttgcaggcggtggctgactcaggaagcaacgtgctttccattcaccagacgattccgcttcagggcagggcgaatgtcacgctctcaatcagtacgtccgcaatggaagaaaacattcatacgttaatgaataaactgagaaaatttgattttatagaaaaagttgagatcttagggtcaggcgcgtaaggagagaagagacatgaaagtcggttatttagggccagaagccacatttacacatctagcagtcagttcctgctttcaaaacagcgtgacacaagcaccttatcaaacaataccggcatgcatggatgcggcggttgcgggagaagttgatcttgcatttgttcctttggaaaacgcgctggaaggctcggttaacttaacgattgactatttgattcatgagcagcctcttgcgatcgtgggggaaatgacgctgccgattcaccagcatctgctcgttcacccttcgagagaaaatgagtggaaaaaacttgagaaaatttattctcattcccatgcgattgcgcaatgccacaaatttcttcaccggcatttttcgtccgttccttatgagtatgcgaagtcaacaggtgcggctgccaagtatgtcagtgagcattcggaccttccgatcggcgtgattgcaaatgaaatggccgccgctacatacggattgagcatcgtgaagcgggatattcaggattatcaggacaaccacacgagatttgtcattctttcgcctgaaaaagacgtctcattcgaagtgaatgcgaaactgtcttcacggccgaaaacgacgatgatggtaacgcttccccaagatgaccaatcaggtgcgctgcacagggtgctgtccgctttttcatggagaaacctgaatttatcaaagatcgaatcgcggccgacaaaaacgggtctcggcaactatttctttattattgatattgaacaggcgatggatcaggttctcattcccggtgccgttcaagagatggaagccctcggctgccgggtcaagcttctgggaacatatcaatcctattcgatataaaaaaagcccttcagggggcttttttttaatcttttattaaaatacccgcgtcgtccagcgcttggcaggcttggtcaatccgctcttttgtcggggcgcttaacgtatggaggtgcacgcctccggtcagctgtgaaaggtaagcggcatttgtcgagttaatgtgatccatgaattgtttgacttctttccgtgtactgactcttatggcggcggttaaatcgccgtatacggggtgttcaattatgacgtcctttatggtgacgccttcatcgacaataagtgcaagctcttcttccgtccgctccgggccgtgcagacaggcgacaatccgttcggcatttttttcgccgccggcattcatgctgatgtataagtagccttggctcgtcgcgataatcggctcgttttttgctttcaaaagcgatatgtcctgcacgatcacctgtcttgagacatttgcttttttggccaattcgcctcctgttaatggcgagccggcttctttcagccaatgaagcagcatgtcgcgtcttttctccccagtaagcttcgttccttctgtcaaattgctgattctcctttcttttgctcccatagcgccgtaaatgtatgtatcagcatatcgagctgttcacatgttgtttcgtttccgaatgagatccggaaaaactgccgcgcttcccgttcggtttttctcagcgccttcatagctgaagaagggccgtggctgccggcggaacatgcgctcccggttgagatgcaaatatcgttacgattacattctaacataatatattgtccttcaaaggagtgaaaaaaacacccgacaatgtggggcaggcattcaccgccggtttcttcctctgaaaatgaaatggggaggccttgacgccgaatttggtcatacaaataattcctcagcctgtcagcatgctcacggtgttcctccatatgtttcactgcatactccgcagcagcggtaaaagcgccgatggccggcacattcaccgtaccgggcctgaacccgttttcatgcacggtatgcggataaaccgggttccagctgacaccgggccgaatgtaaacagccccggtgcctttcgggccgtatactttatgaccggagatggaaagggcgtcgattcccgcctgatccgcatcaatcggcagtttgccgaaactttgaacacaatcgcaatgcagcaaaatgtttctctggtgaagaaaagcggccagacgattcacaggctggatgaggccggtttctgaattggcgtgctgtatggaaacgagccccgtgtcaggacggacatgagccgccagtatgtcctcggttataaggccgttttcgtcgggatatatgatggtgacatcaattccacggtcagctaaaaacgccgcggcattatggatcgaatggtgttccattgcggtcgtaataaaatgttttttgtgatcgggcaggccgtgcagcaatgattggacggccaggatgttcgcttccgttccgccgcttgtaaagtaaatgccgtctgccgctccgccgatcaatttgcctgcagaatgtctgcaatattccagcacgtccgccgctcttcctccggcgtcatgaaggctgcttgcattgccgtatacctctgtgctgagatgctgaaagactttcgcggcttctttgcttaaaggcgctcccgccgcgtaatcaagataaatcatacagcccgtctcctatccgtttatgttaaaaaaagcttgagtttattttatcgttgtgtaaatataggtgtcaagacaggtgtaaacataacaggagggtgatgtatgtctgaaaaaacaattatcgtcattggttcggggacggcggcccttgcctgtgcttcctcatttcctccgtcataccaagtgaccgtcatcacaaagagaaacgtaacgaacagcaattcgcattatgctcaaggcgggattgctgtttcatatgcaaaagatgactctatagaatcccatgtgaacgatacactgtatgcgggatgcggacacaatgacgtgacagccgtgcggcatttgctgaaaagcggacaaagcatgataaacaggctgatagaaggccatttcccttttgatacgaagtcggacggaacgttttgtctcggcagggaaggcgctcattccaaaaggagaattctgcacgccgggggagatgcgaccggacggatgttggttgagtttctggttcagcagctgagggacggcatacggatcattgaacacgagacggttgttgatctgctgattgaacacggacgatgcgcaggcgttgccgcaaaggatgcttcaggcgctgtttcttacagaagagcggattgtgtagtgcttgcatcaggcggctgcggcagtctgtaccaatatcacacaaatgattccgccataacgggagacggcatcactcttgccttccgcgcgggagctgagatcacggatatggagttcacccagttccacccgaccctccttgtgaaaaacgagactgtgtacggcctgatttctgaagcagtgaggggagaaggcggatatttagcggatcgcttcgggcgcaggatcatggctggcagacacgcgcttgaagatttggcgccccgggatgtggtttcacgggcgatttatgaagaaatgatgaaagaaaatcctgtttttataaattgcagccgaatagccgattttaagaaacgttttccgaccataacagaaatttgtcaaacagccggtgttgatcttgaaagcgggattcccgtagcacccggaatgcattttttaatgggcggagtaaaagccgatacatgggggaaaacgtccgtgcctgatttgtacgccataggcgagaccgcctgcacaggattgcacggggcgaaccgccttgcgagcaactcactgctggaagcgctggcaagcgggaaacgatgtgctgaacatatcactcaaacaccgttaaacggaagatataaaaaaaccccgaagaaatctgacgtcatcttagaagtgccggacacaacgcttcatgtgctccaagccaaaatgacaaccggagcgggcattgtcagggaaaaagaaaacctgcaggcgctggcatcctggcttaacaacgtatctgtgcgtcatataaatgtgaaggatatcacaatggaacaagccgagctatcctgcttatggaagactgcgcaacttgttgtgacctcagcccttattcgggaagaaagcaggggcgctcattttcgcgctgattttcccgggacggagaaagagtggcacggaaaacaaatcattcattcaacatctggaacagctatcagaaaaaacgaaaggattggggaactatggacattctgcagctaaaacaaatgctgactcatttttttcaggaagatatcggaacgggtgatgcgacgtcacaagcgattttttctgatcagcaatgtaaagcgcgaatcatcgcaaaaacagacggcgtgtttgccggagaagccgttatccgtgaaggatggaagcttttacacgatgatatccgcatccgctccctgaaaaaagacggagaacggatgaaaaaaggagacgtgctcgctgaaatagaaggccaggcggcggctcttcttacgggggagcgggtcattctgaatctcatacaaagaatgtcaggcattgcgacaatgacggatgaggccaaaaggcgtcttgatgatccgtccattaagctttgtgatacgagaaaaacgacacccgggctcagaatgctggaaaaatacgccgttcgggtcggaggcggctttaatcatcgcttcggcttatatgacggcatcatgattaaagataatcatattgctgcctgcggatcgataaaggcggccgtggagcgggcaagaaaaacggcggggcagatgcttgcggtggaagtcgaaattgaatccgaacagcagctgctcgaggcaatagaagcgggtgcagacgttattatgtttgacaactgtccgcctgagtccgtccggcgttttgcaggcatgacaccgggacatatcaaaacggaagcatccggaggcataacgctcggcacattgcccgcttataaaggaacgggcgtccaatatatttcactcggatttctgactcattcagtaaaaagcgccgacatcagcatggatgttgaggctgcggaacaggggaatttttaagatgtctatttttgacgtgctaactgcatcagccgaaatgatgccgagccattataaagacatgagcacaggagaaatggaaaagcgggtcgccgccattaaacgggctttcggaaagcgcctgttcattccggggcatcactatcaaaaagacgaagtaatacaattcgccgatacggcaggtgactccctgcagcttgctcaagtggcagaaaaaaataaagaggcggaatatattgtgttttgcggcgtgcattttatggcggaaaccgctgatatgctgactgatgataaccaaaccgtcattttgcccgacatgcgcgccggctgctcgatggctgatatggcagatattcagcagacggacaaagcatggcaagagcttcaagaactgtacggtaacaccatcattccgttaacatatgttaactcgacggcggaaattaaagcattcgtcggacggcacggaggagcgaccgtcacctcttcgaatgcccggagtgtgctgaaatgggcttttaaacaaaaagagagaattttatttttgccggatcagcatttaggcagaaatacggcctatgacctcggcattccgctgacagaaatggctgtatgggacccggtgcagaaccgattgcttactgaccatccggaaaacattaaggttatcctttggaaagggcattgctccgtacacgaaaagtttacagcggaaaatatttctcagctgcggcagcgggattccggcatccgcattatcgttcatccggaatgttcgcgggaagtggtctcgctcagtgacgacagcgggtctaccaaatacattattgatacgatcgaacaggctgaaccgggaagcaaatgggcgatcggcacggaaatgaatcttgttcagcgcctcattcacttgcatccggataaacagattgaatcattgaatcccgatatgtgtccgtgtcttactatgaacagaatcgacctgccgcatttattgtggtcgcttgagcagcttgaaaaaggcgagccgaagggtgtcattaaagttccggaagcggttcggacagaagcgcttcgtgctttgaacagaatgctgagtcatacgtaatcataaaaatttcccctccttcccaaattttttatcatcatgcccagtccaccggcatatagtgtgaagaaacgtattgtaatgacaaatgtaccgttcacgttttgtgcataggaggggaaaacgttgaaaattcatatcgttcaaaaaggcgattcgctctggaaaatagctgaaaaatacggagttgatcttgaagagttaaaaaaactgaatcatcagcttagcaatccagacttaattatgcctggaatgaagataaaggtgccttcagaagccgttccggtcagaaaagaacctaaggccggcttcggaacgtctgcgcataagcatgagcatccatatgccaaagaaaaaccgaaatcagttgtggacattgaagacaccataccggaagaaccaaagccgtcaattccgtatgtgccgccaatccctgaaaagcatgaaaatgtgctgccggaagctgatatgaaccaatattacccgtccaatcagctgtttcagccgtggtcgcctcctaagccggaggaaccggtgacacattttgtcgagccgaaagaaaaagagcatgacaataacattccacaacaggaggaaatgatcaacatggaaaacgcgaattacccgaatatgccaaaggcgcctgaagccggaaagatggaagaagaaaacgccgcttatcatctgccgaacatgccaaacattccgaatgtcccgtttccgaatatgccggccgttgaaccgtcttttatgcattacccgatgccgtgcatgccttgtccttgtccggttccggtgacaccgatgctgccgggttcgggactatgccatccgtgcttcccggtaggcggaggtttcggcggttttggaggaggttttggaggctttccggtaatgccgatgccgttaccgtacggattccatcatccgggatttgggccgcaagcgggttacggtgaatttgaaaaccaggcccatgaaaatgcagagcattatgatggttctgcatctggtttcggcggtgctccgtacggtcaaatgccgtattacggcggatattcgtcacattacgcaaacgcgcctcatcatgatggaaaatataaggatgatgattgcggctgccatgattcacatcatcaccaccaccatcaccacggttcacatcaccatcacgcaaatatgcctgtgcagccgtatccgaatatgggtgcaaacgccggatattttatgccttacggcggagcaaatcctagtgccgcgccgaatcagccgagtccaaatcaagtattcggacggccggaggaagaagaagattaatgtttcgggacgatgtatgtcgttcctttttttatgtccaactgaggaatggacataactgacaagcttaaatccgccgcccgccgcacatcctaaacatgagcggaaaacgctcaaaacagcgatgaatccacggggggtttttccattgggtaaaaaactgatgacgatcgcgggcgttttagccgtgacggcaagcttaacggcatgcggagcaaataatgccatgaatgacggacgctacaaccagtcaacacgtccggtcggatattattcgaatgataatggtaacggcagaggccagtacggcatggaccatcaaggacccgtttctgaaatgatggaaaaccgaaacggccgtcataatacgacaaacgtgtccgaccagtacgcgcctaatgacggggttccgttaacgacggacggcacatataacggccgaaatgtcaatacgccgccggcagcaatgtcttataatgggtatgacaacgccgaaaacatcaggttggcggcaaaagttgcaaaccgcgtgaaaaaagtaaacggcgtacaggatagtcaggtcatcgtgactgacacgagagtcgtcattgccgtcagaacaaatcatccttttacgaaaaatgatgataaacatgtcaaacatgcggccaaaaaattcgcggacggccgtacaattcaagtgtttaccgacaacgctacttttacaaagctgcaagacatgaacagaaacagccgttaaacgggactgccggatgatttcatccggcagtatttttatgaataaagcttcatcatttctttacatattcttaaaacgctctttatattgcggtgttaacataaaagtaataaaacgtaacggaggggccgggatgaaaaaaacggagcatgacaaaagccgcggagcaaaaactgtgtatctgaccgtaaggggataccggctcaaactgacgcccggacaaatgaaactgatttcagccggacgggcataatcatcgcagcagccctcatttagagagctgctttttttcggctgaaacagacaaatgaaagaaaacggttaagcaccggcatctttggtcaaactagcatcaagagtttgattgaataaagaggtgttattggtgaaacgaatttgcggtgctcgtctattgtttatgcttatcttatcggctgcagccctgatttgcggaggaaaaggcgcatacggggcggaggtcgagcattacgggccgcttcgggtgcacgtccagctggaaaaggtctatctggacggtgatgtcggcatcgaacatacggatgaaaccgttttggcgatggaggatttttgggccgcatatgcgggctggacgctcgttgagcagaaaaaaggcttcgtccttttccgtaagcatgttgatgacatttctccgctcagtaaggttaacggttatatcggcgtcacggacgggggcgtcatctccacttttcacggccgtcccggatcgctggccgagccgattcaatctttcttccagattgatatagaaagactggaaagccgattgcaaaagcacttggaacacggcataccgtacaggacaaaagcggagtttgagagcgtgatcgatcatattaagacttacagcggctgactttgacgcaagacatgtgacacatgtcttttttttctgaatggaaggtgtcaaagcgaacatacgttaacttttctataagactttggctgtttttgtgttacaatgataagcagtcaaagaggtgaataggtgtgattgaattcgtgaaggggacgattgattatgtatctccccaatacatcgtgattgaaaacggcggaatcggctatcaggtcttcactccgaatccgtttatttataaggtaagcaatcaagagaccatttttacgtatcatcatataaaagaagatgccttttctttgtacggtttttcaacccgggaagaaaaagcgcttttcacaaagctgctgaacgtcaccggcatcgggccgaaaggggcgctcgccatcctcggctccggtgatcccggagccgtcatcgaagcgatcgaacaggaagatgaagcctttttggtgaaatttccgggtgtgggcaaaaaaacggcgcggcagattattcttgatttgaaaggcaaactggccgacgtcgtgcctgaaatgattgacaacctgttcaatcatgaagcgcgcattgaaaaacaagaggctgaaacggcgcttgacgaggcgcttgaagcgctccgggttctcggctacgccgaaaaagaaattaaaaaagtgcttcctcacttaaaagaggaaacggcgctttcaacagatcaatatgtgaaaaaagcattgcaaaaattattaaagtaaggtgatgttcatggatgaacggctcgtttcaagtgaagcagacagccatgaatcaataatcgagcaaagcctcaggccgcagaatctcgcccagtatatcggccaaaagaaggtgaaagaaaatctgcgcgtgtttatcgatgcggcgaaaatgaggcaggaaacgctggaccacgttcttttatacgggcctccgggtctcgggaaaacaacgcttgcgtctatcgtggccaatgagatgggtgtggagatgcggacgacgtcaggtcccgccatcgaaagaccgggggatttggcagccattttgacggcgctcgaaccaggggatgtgctgtttatagacgaaattcacaggctgaaccgctcaattgaggaagtgctgtacccggcgatggaggatttctgccttgatattgtcattggaaaaggcccgtccgcccgctccgtccgtctcgaccttcccccttttacgcttgtaggagcgacgacaagggtcggattattgaccgcaccgctcagagaccggttcggggtgctgtcgcgccttgaatactatacgcaggaagagctgacagatatcgtgtcaagaacggctgacgtttttgaagtggatatcgaaaaagccccggctctggaaatcgccagacggtcaaggggaacgccgcgggttgcaaaccgtctgctcagaagggtgagagattttgcccaggtgctcggcgacagccgcatcacggaagaaatcgctcacgacgcgctcgaacgtcttcaagtcgatgcgctcggccttgaccatatcgaccataagctgctgatgggcatgatcgaaaaattcagcggcggtcccgtcggccttgatacgatttccgcgacaatcggcgaagaaccgcatacaatagaggatgtgtacgaaccgtatctgctgcagatcggatttcttcagaggacgccgaggggacgggtcgtgacgccggctgtgtatgaacattttcgattggaggcgcccgcccgtgactgactttccgaaggttctcatggttctcggtgccgttttgcttattgccggcgcagtctggcactttgtcggaaggctgcccggagatattttcgttaagaagggaaatgttacatttttctttcccgttgtcacttgtattgtgatcagtgtgatactatccattctgcttaattttttcggcagaatgaaataacaatagacagaattaaggtgaaatgatgaaagtcgatttatttgattttgaactgcctgaacgcctcattgcccaagtgccgcttaaagagcgtgacgcatcgcggctgatggtgctcgacaaacagacgggcgggctgacggacagttcatttaaagagattgtaagcttttttaatgaaggggattgcctcgtcttgaacaatacccgtgtgctgcctgcaagattattcggcacaaaagaagatacgggagcgaaagtggagcttctgttattaaaacaggaagaaaatgatacatgggaaacgctcgtaaagccggcgaaacgcgtaaaaaaaggaacggtcctgacatttggcgacggccggctgacagcggtctgcacggaggagcttgatcacggaggcagaaaaatagaattccggtatgacgggattttttacgaagtgcttgaatcactcggtgaaatgccgctgcctccttatattaaagagcagcttgatgataaagaacggtatcagaccgtcttttcaaaagaaatcggatctgccgcagctccgacggccggacttcattttacggaagagattctggacgagctgaagcaaaaaggtgtgcggattgaatttatcacacttcatgtgggactcggcacattccgcccggtcagtgcggatgatgtggaagagcataacatgcacgcggaattttatgaaatgacggaagaaaccgccgcctctttaaacgaggtcagaaaggcgggagggcgcattgtgtcggtcgggacgacatccacgcgcaccctggaaaccattgccggcgagcatgacggcgtatttaccgcttcaagcggctggacgtccatcttcatttatccgggatatgaatttaaggcgattgacgggatgatcaccaattttcatctgccgaaatcttcccttatcatgctcgtttctgcgcttgccggcagagagcatgttctttccgcctaccgtcatgcggtagaagaggaatatcgtttcttcagctttggcgacgccatgctgattatctaatttgaatgacaggaggcctcatacaaagtggctgaacaaccgatacgttatgaatttataaaggaatgcaaacaaacgggagcgcgactgggcagagttcatacgccccacggctcctttgagacgcctgtatttatgccggtcggcacgcttgctacggtaaagacgatgtctccggacgagctgaaatctatggatgcgggcattattttaagcaatacgtaccatttatggctccgcccgggacacgacattgtaaaagaagcgggcgggcttcataagtttatgaactgggaccgcgcgattttaacggattccggcggttttcaggtcttttcattgagcaagtttcgtaatatagaagaagaaggcgttcatttccgcaatcacttaaacggagacaagctgtttttatctccggaaaaagcgatggaaattcaaaacgccctcggctctgatatcatgatggcgtttgatgagtgtccgccgtatccggcagagtatgattacatgaaacgctctgtggaacggaccagccgctgggcggaacgctgcctggaggcgcacgggcgctcagatgagcaggggctattcggaatcgtacagggcggagaatacgaagacctgcggacacaaagtgcaaaagacttggtttcgcttgattttccggggtatgccataggcggattatctgtcggcgagccgaagcacgtcatgaaccgagtgcttgagtttacaactccgcttttaccgaaggacaagccgagatatttaatgggtgtgggttcaccggatgccttaattgacggcgccattcgcggcgtggatatgtttgactgcgtactgccgacccggattgcccgaaacggcacggtgtttacgaatgaagggcgtctgaatatgaaaaacgccaaatatgagcgtgatttccgtccgattgatgaagagtgcagctgccatacatgcaaaaattactcccgcgcttacatcagacatttgatccgctgtaatgaaacgtttggaattcgattaacaacttaccataaccttcattttctgttacacttaatggagcaggtcagacaagccatccgggaggatcgtcttggtgatttccgagaagagttctttgagcgttacggctataataagccaaatgcgaaaagcttctaaataaaaccattcttgaagggagggaaacagatgggtactttaggtacaatcgttcctattattttaatgtttgcagtgctttatttcctgctcatccgtccgcagcaaaagcagcagaaggccgtacgccagatgcaggaagagctgaaaaaaggggattcagtggtgacaatcggaggattgcacggcactgttgattcaattgatgaaagcaaggtcgtcattaaaacaggtgataacacccgtttaacatttgaccgccgcgcaatcagagaagcttccgctgaataacagcgaagctcatacatacaaaaaaagagcggagaatccgctctttttttattacgctgatctgcttcctttcaaattcactccgaaaatgccgcccagcatactgactcccaaaaagccgagatgaaacaaaagctgaccggatgtaaacgtttttccgaaccctaaatattgaaacagcaagatgattaatgaaaaacagacggcggttaacgctccgatcatccagcctttttccttcgctttgccgcccgatataaaaccgcccgcaaataaagaaagaaaagaaagcgcggtgatcagccagctgaaagatgattcttccattgaggtaaccgtcagtaaaagcgaaatcgccaaactcgtaagaagcatcaccgcaaagatagccactaagccgtacaagacgcctcttcccacttgtttcgtttcttccatttttatctcctctccgctctgcggcctgatatatgacaagccggagcctgtctttttctaaatgtattctctgaatgttcgaattagacttaaatgcatgatgttcagcccgtttcttacataattcagagccgatggcaaatgctatgaccgttggaggtgcgatatggaagatattttcattattacgtttcgtacgattgtgctttattttatcattcttgtgattttcagactgatgggaaaacgggaaatcggagaactgagcattttagaccttgtcgtctccattatgattgccgagattgccgtattggcaattgaaaatgtaaaagataagcttttgcatacgattgtgccgattgtcgttttaatgattattcaagtaagccttgcttttatttcgctcaaaagccaaaaaatacggcagctgcttgacggaaaacccaccattattataaaacagggaaaaattgatgaacgggcgatgagatcgcagcgctacaattttgacgatcttcttatgcagctgagggagaataacatcgatagaatctctgacgtgtcatatgccattttggagtcttcaggcaaactgtcgatcgtcaaaaagaaaaacaataaggataagcagatggaaacatcgcttatcgttgacggggtcattcagaacgagcatctggacagaatcgggaaagataaacactggctcgaaaaaaatttagcaaaaagaggatatcgcgatttttcggttatatcattctgcacgtttacggacggcgctttttttattgatcttaaagatgaaaaaggggagccatgaatcggtttcaccgcgtcacgaacttgccgatgaccggaatccggatcagctcttcccttttaatcagcctgaataacagaagaagcgctatatacaaaatcgcggtcattgcaatccagcctgtgagattaacagcctctgaccctgaaaaatgaacggcgtgtttgatgatgcggctgacatagccgcaaatgaatatgacggcaaaacagagcgcgtattcttttattttaatgctgatcggaagcaccttgcttacggtggccgcatgcagcagggtgacaagaaccatccccgttacaatcgcaagtgcggcgcccatgatgcccaaggaaggcctggtcgccaaaacaaaaattagaccagttttgacagcggcgccgataaaactgttcatcatggcggccccggctaaattgagagcctgcagcaccgcctgaaggggcccctgaaaatagtaaagcaaaaaaaacggcgccatcactttaacaaataccgccgcattagttgatccgtacatgacggacatcagttcatcagcgaaagagaataaaataaccaccgaaatgcctccgcttaaaagacacagccgcatcgcctgttccagacggtattcgacaacttgcagctttttttgctccattccttcactgatcgcaggaacaagtgccgttgacagagaataggttataaagctgggcagcgtcaaaaccgtcatggcaaatccggtcagctccccgtactggctggtggcggcagcggtggccactcctgcaatcgcaaggctttgcgcgacgacaataggttcaaaaaaccaagataaatttccgatgaagcggcttccggttgttgggagcgacacgctcatcagctggcggaaggtttcttttccatttgcgatcgacttgaaaaattgttttctgattctgattgttttatttgctttaaaacaaatgaataaataaataagagaggcaagctccccgatgacagacgaaatcatggctccggctgcggcatattcaatcccgtacggcagaaacaccgtcgtgcagaccgcgacaagtgaaatccgcacgatctgctcaagcacttgggaaaacgccagcgggttcatattctgccttccctgaaagtaaccgcgcagcacgctggagatcgcgataatcggcacgacgggcgtaatcgccagaagcgggtaaaccgtgcgctgatccgtcagcatcgtttcggacataatcggcgcaaagcataaaaacagcggcgtgaagatgagacttaatatcccggtgacggtaagcgacatcactaaaatatgtttcattttctgccggtccccccgcgcgcttgcttcagcgacaagtttgctgatggcaacggggaggccgaattgagtcaaagtggtggccaagaaaaatgtcggggcagccatcatgtataaaccgaccccttcttcaccgataaaccgggcgataaccacccggttgacaaagccgagcattctcgtaatcatcccggctgcgatgagaataagagtgccccttaaaaaagtctgttttgccattttataaacccctgccttctcaaactacctggaatcatatacaataaagatatgcgccgatgtcgtccgagcatgacaagtcttcgagaaaaatggaaaaaggagcgagcgcccagtggagaaacatcccgccgaaatgtacaaagatcatttgcggcctttcttgtacagtaaacttgaagagttcaaaatcctcggatacgatgatgttgagcacgagagtttatggtcatacttaatacataaaaagtggaaacagaaaaaggaactgccgctgcatgaattggccggtcatattttatcagttaaaattggcgattttatgaactatgcaaccgttgaagcttttaagtcgtctaattggctggaaagcgatgagggtcaggaagctttagatgaactgctgagataatgatttgacggcataggtttaaggaggaaatacataatgaaaaaaggacgcttgattgcgtttttcctgatcgtattattgatcggcacagggctggggtattttacaaaaccggctgccaataatattacgttaggattggatttacgcggcgggtttgaagttctgtacgatgtgcagcccgtcaaaaaaggcgataaaatcacaaaagacgtgctcgtcagcacggtgcaggcgctgaaccgccgggctaacgttctcggcgtaagcgagccgaatattcagattgaaggaaataaccgcatccgcgtacagctggcgggcgtcacgaatcagaacagggcgcgcgaaattctgtcaacggaagcgcagctctcgttcagggatacgaatgataaagagttgttaaacggctctgatctcgtggaaaacggcgcgaagcaaacctttgatccgacgacgaacgaaccgattgtcagcgttaagctgaaggatgcggataagttcggcgaagtgacgaaaaaagtcaagaaaatggcgcctaataatcagcttgtgatctggcttgattaccaaaaaggcgattcttttaaaaaagaagtcggcaaaaaacatccgaaatatgtatccgctccgaatgtgagccaggaattaaacacgaaggatgtcacaattgaaggccagtttaccgttcaaaaagcgaaggacttggccaatattttaaacgcgggcgcgctgcctgtgaaactgaccgaaaaatactctacttcagtaggggcgcaattcggacagcaggctttgcatgatacggtagaggccggcatcatcggtattgcaattgttttcttatttatgctgctttattacagactgcctggactcatagcggtaattacgctttctgtatacgtgtatattacgcttcaagtgtttgactggatgcaggcggtgctgacgcttccgggtattgcggcgctcattttgggtgtcgggatggcggttgacgccaacatcatcacctatgaacggataaaagaagaattgaaactcggcaaatccgtccgctcagctttccgttcagggaacagacgttcattcgcgacgattttcgatgcgaacattacaacgatcatcgcagcggtcgtgctctttattttcgggacaagctctgtaaaagggtttgcgacgatgctgattttgtcaattctgacaagctttattacagctgtcttcctttcaagattcctgctctcccttctcgtggaaagcagatggcttgaccggaaaaaaggctggttcggcgtcaagaaaaaacacattatggatattcagaagaccgacgaaaatactgaaccgcatacggcattccaaaaatgggatttcacgagcaagcgaaaatatttctttattttctcaagcgctgtaaccattgcgggaattatcatcttactggtctttaaactcaacctgggaatcgattttgcaagcggcgcgcggattgacgtgcagagcaatcatgcattgacggcgcatcaggttgaaaaagattttgactctctcggcatggaaccggaaaacatcgtgctttctggtaaagagaaccatgttgccgcggcccggtttgtcggagagccatctaaagaaaaaatcgctgaaatcaaaacgtactttaaggacaaatacggatctgaaccgaacgtcagcacggtatcgccgacagtcggaaaagaactggcccgtaatgctttatatgctgtcgccattgcatcaatcggcatcattatttacgtgtcaatccgtttcgagtacagaatggctatcgccgcaattgtatccctgctgtacgacgctttctttatcgtcgcgtttttcagcattacaaggctggaggtcgatgtcacctttatcgccgctattctcaccataatcggttactcgataaatgatacgatcgttacatttgaccggatacgtgagcagatgaaaaaacgcaagccgaagtcatttgccgatctggaacatatcgtgaatctgagcttgcagcaaacctttacacgttcgatcaatacggtcttgaccgttgtgattgttgtcgtcgtgctgctcattttgggctcatcgtcaattacaaacttctccgtcgccttattggtcggtttattgacgggcgtttattcctctctttacatcgccgcgcagctgtggcttgtatggaaaggtaaagaatttaaagggaaaaaatcaatcgaagagtaaaatgggaacaggctgtcttccggaaggcagcctgtttttttaggccgcattgaacttaaaacctgcatttgctataatgacatacgcttacataatcaatcatcattgtaaaaacatgtaggagggttcttatgaacgttcgtgagtcggagcttccgggcatcggccagaaagtagaagtcattacgaaaaatcacgataaaatcagtattattcttcatgatgacggcagaaaagagctctattacttcgatgagaatgatcatgacgaatgcttggcatccgttgaatttaacgacgaagaggcgaggcagatttccgctattttaggcgggatgacgtataagccgaaagcgctggaatctgtggaagttgcgcttgatgacctcgtcattgagtggtttaaagccgaatctcatgcaccggctgtcagccgtacaatcggagatttggagatcaagaaacattacaacgtccagattattgcgatcataaagaaaaaccggcaaaaacagctgagccccggcattgataccgtaattgaagaaggggacaccctcgtcatatcgggagaaagaagcggactgaaaaagctggtccgcgagcaattaacggcccggatttcctgagaccggggtttactcccggggaaatgggggaaaagataagaatgaacaattgggggcagacgcatgaataaacaatggactattatattcgctttactatttactttgattgtcgccatctttgctgtcattaacgtgcgggcggttgaggttgattatctgttcggaaccgctgaatggccgctgattttagtcattttaggctctgtgttaatgggagcgctgatcgtgttttcagccggtatctttcaagtgatgaagctgaagcgccaaattaaaatgctgcggaaagaaaacagatccgcaggtgaattgacggctgattcggacggccaaaaaacagccgcgccgccggaagaaatgcttgaagagaaaaaaggatcagaataacatttgaaacccctcagtccgctctagtataatagggtggttgaggggtgaatttatgttagcgtcaaaaatgcgctgggaaatccagcagccggatcaggaaaaagtcaaatcactcacagaacaattggacataacacctcttgtggcatcactgcttgtaaaaagaggttttgatactgccgaaagcgcaaggctgtttttacatacaaaggatgcagacttttatgacccgtatgaattaaagggaatgcgggaagcagttgatcggataaaactggcggtttctcaaggggaaccgattatgatttacggagattacgatgcagacggcgttacaagcacgtcagtgatgctgacggcactcagacagctgtcggcggacgttgacttttatattcccgaccgtttcacagaaggctacggcccgaatgaacaagcttttcgctccataaaagagcggggattttcgctgatcattacagtggatacgggaatcgccgccgtccatgaagctgaagtcgcaaaagagctgggcttagacgtcattattaccgaccaccatgagccgggacccgagcttcctgacgtatttgcgatcatccacccgaagcagccgggatgcggctatccgtttaaagaattggccggcgtcggtgtggcgtttaagcttgcccacgcgcttacgggttctttgccggaagctatgctggacttggcggcaatcggtacggttgcagatctggtgcctcttcatgatgaaaacagattaattgcgtcactcggaatcgaaaggcttcggacgacaaatcggccgggcctcaaagccctgattaagctttccggcggagatatcggacaagctgatgaggaaacgatcggatttcaggtcgcgccgaggctcaatgcagtcggaagaatagaacaggccgatcccgccgtccatctgctgatgaccgaagatcagtttgaagcggaggaactggcttcggatattgaccggctgaataaagagcggcagaaaatggtgaaaaccatgaccgaagaggctgttgaaatggttcagcagcaaggcggaaacccgtctgccattgtagtggcaaaagccggctggaatccgggagtcgtcggtattgtcgcatcgaagctggctgaacgtttttaccgtcccgctgttgtgcttgggatagatgaggagcagggaatcgctaaagggtcggcgcgaagcatcagaggcttcaacctgtttacgagcctttcacagtgcagagacattcttcctcatttcggcgggcatccgatggcggcaggaatgacgttgaaggctgaagatgtggcggaattaagggacaggctgaatcaaatggctaaagaaacccttacggaagaggattttattcccgttcaggaggttgatcttgtgtgcggcgttgaagacataaccgttgaaagcattacagaattaaatatgctgtcgccgttcggcatgcttaaccctaaaccgcatgtgatggtgaaaaatgccgtacttgatgatgtgcgcctgatcggagcgaataaaaaccacgtgaaaatgacggtgaaaagtgattccgccgtccttgactgcgtcggctttaacaaaggagagcttgaagccggaattgtccccggatcaacgatttccattgtcggcgagatgtccattaatgaatggaacaacagaaagaagccccagctgatgattaaagacgctgcggtgccggaatggcagctttttgatatcaggggcaagcggacgtgggaagacacggtcaccgcgctgccgaaggaaaaacgggtgctcatcagctttaacgaaaaaaccgctcagaagctccgtgcaaaagagctgtcaggcgagctggccgggatcacatcggaatccgaggcggaagctctccagcttgacggaaaatatgccgtttttctggatgtgccgccgtcagcggatcgcctgcagcatttgcttgacggaaagaagccggaacggatttattttgtttttatcaatcatgaagaacatttcctgtcctcatttccatcgcggaatgatttcaagtggttttacgcatttctcttgaaaaggggcgcttttgacttcggcaagcatggttcagagcttgcgagacacagaggatggtcaattgacacaatcaatttcatgacaaaggtgttttttgatctcggttttgttaaaatagaagatggtgtgctgtctgtcgtgagcggcgcgaaaaaacgcgacctggcagattcgcaaacctatcaggtaaaacagcagctgatggaattagaccagaagctcaattattccgcagcccatgagctgaaggaatggctgaataagctgatgaaccaaggttcagaagcttatgaaagtacgaggaggacatagaacagatggatcttaaaaaatacgtaacaattgtgcccgattacccgaaagaaggcgtacaatttaaagatattacgacattgatggacaaaggcgacgtatatcgttacgccactgaccaaattgttgaatatgcaaaagaaaaagaaattgatttagttgtcgggcctgaagcgcgcggctttattatcggctgtccggttgcatacgctctcggagtgggctttgcgccggttcggaaagaaggaaaacttccgcgtgaggtcattaaagtcgattacggtttggagtacggaaaagacgtactgacgattcataaagatgcgattctgccgggacagcgcgtgctgattactgatgacttgcttgcaacaggcggcacgatcgaagcaacgattaagctggtcgaagaactgggcggcgtcgtagccggtattgcgttcttaatcgagctgtcttaccttgacggcagagacaagcttgacgattacgatattttaacattaatgaaatattaaccgcatatggaaaaaagcactcgtgtcagggtgcttttttcctattatttcatcatcctgacagattctttaggtgttttgaacttctgccctttacatctctcgtttttttcttgataataaactaatacagtttacatttaaaaaaggtgattccatggcgaacgaacaagtattgactgccgagcaagtaatagataaagcgcgcacttatctgccggaggagcagattgcgtttgttgagaaagcttacctgtatgcgcaaaacgcgcatcgcgaacagtaccgcaaatcaggtgagccgtacatcattcatccgattcaggtggcgggcattctcgtcgatctggaaatggacccttccacaattgcgggcggatttctgcatgacgtggtagaggacacggatgtcaccctcgacgacctgaaggaagcattttctgaagaagtggcgatgcttgtcgacggcgtgacgaagctcggtaaaattaagtataaatctcaagaggagcagcaggcggaaaaccatcgaaaaatgtttgtcgctatggctcaggatatcagagtcatattgatcaagctggcggatcgccttcacaatatgcggacgttaaagcatcttccgcaggaaaagcagcggagaatttcaaatgagacgctggaaattttcgctccgctggcccatcggctcgggatttctaaaatcaaatgggagctggaagacaccgctctccgttatttgaatcctcagcaatattacagaatcgtcaacctcatgaagaaaaagcgcgcggaacgcgaactttatgtcgaagaggttgtcaatgaagtgaaaaaacgcgtcgaagaagtgaatatcaaagcggacttttcaggacgtccgaagcacatctacagcatttaccgcaagatggcgctgcaaaataaacagttcaatgaaatatatgatctgctcgccgtccgtattcttgtcggaagcattaaagactgctacgccgtcctcggcattattcatacgtgctggaagccgatgccgggcagattcaaagattatattgcgatgcctaagccgaatatgtatcagtccctgcatacgaccgtaatcgggcctaaaggcgatccgctggaagtgcagatcagaacatttgagatgcatgagatcgctgaatacggggtggccgcacactgggcatataaagaaggcaaggctgcaaacgaagaagcgacatttgagaaaaaactgtcctggttccgtgaaattctggaattccaaaacgagtctaccgatgcggaagaatttatggaatcgctgaaaatcgatctgttttctgacatggtatacgtatttacgccaaaaggcgatgtcattgaactgccgtcaggctctgtgccgattgatttttcctacaggatccactcggagatcggcaacaaaacaatcggggcgaaagtgaacggaaaaatggtgacgcttgaccataagctccggacgggcgacatcgtcgagattctgacgtccaagcattcatacggtccgagtcaagactgggtcaaactggcgcagacgtcccaggcgaaacacaaaatccgccaattctttaagaaacagcgccgtgaagaaaacgtcgaaaaaggccgtgagcttgtcgagaaagaaattaaaaatcttgattttgaagtgaaagatgttttaacactcgaaaatcttcaaaaagttgccgacaagttcaatttctcaaatgaagaggatatgtacgcggcggtcgggtataacggcattaccgctcttcaggtggccaacaggctcaccgaaaaagaacggaagctgcgtgaccaggaagagcaggaaaaaatcgttcaggaagtcacttccgagccgaaacattatccgcaagggagaaaacgggaagcgggtgtgcgcgtaaaaggcattgacaaccttctcgtccgcttgtcgaaatgctgcaacccggtgcctggcgaccatattgtcggttttattacaaaagggcgcggtgtatccgttcaccgggatgactgtccgaacgtcaaaacgaatgaagcgcaggaacgtctgatccccgttgaatgggagcatgaatcacaggttcaaagacgcaaagaatataacgttgagattgagattttgggatatgaccgtctcggacttttaaatgaggtgctccaagccgtaaatgaaacgaaaaccaacatctcctctgtctccggcaaatccgaccgcaataaagtcgctacgattcatatggcgatttttattcaaaacatcaatcatctgcataaagtggtcgagcggattaagcagatcagagacatctattcagtccgccgggtaatgaactaaaaggagcgcttgctatgaaattagttgttcagcgtgtaacagaagcgagtgtgacggttgacggcgctgttgccggccggatcggacccggcattatggcgcttgtcggcatcactcatgaagatacagaagaagatgccgcttacttggcggataaaatcgtgaatcttcggatttttgatgatgaaagcggcaagatgaatttatcgcttttggatacgggcggggagattttatccgtttcacagtttacgctttacggcgaaacgaagaaagggagacgcccgaattttatgaatgcggctaaaccggatcaggctgtgctcctttatgaaaagtggaacgaactccttcgggaaaaaggagtcaaagtggaaaccggaatattcggagccatgatggatgttcagctgacgaattccgggccgattacattgattatggattctaaacaataaaaaagctgccgttcggcagcttttttttatgattgaaaataatgttccaatccgctttcaattccgtctgtcactttttcctgatacgagccgctatgtatgattgtttcttcttgcggttgactgagatagccgagctcatacagcatggcaggccgtttattttccctcaggacgtaataatcgccaaacagaacgccgcgatccgggataggggaacgcttcactacttcagaatggacgtctgaggcaagctggcgatccttagacggactgtaataataagccgtgcttccccgtgttgacgtatcggcatagctgtcatagtgaatgctgataaaggcatccgcattccggtaatgagaggttgaaaccctagcctgcaggctgataaaagtatcatcctgtctggtgatatacacgtttgcaccggccgcccgcaatttttgggccagcagcttagcggttttaatggttacgtttttctcaaactttccggagtagccgatcgttccgctgtcttttcctccgtgtccgggatcaacgacgatcgttttgtttttaagtgagccgctgccgcctgacgtgtcgggagaaggtgcttcacctgtttcctcaccgctttttgacgtttgtacgacccagtttgccacatatgcggtttgtccgttttcaagccggacttcataccatttgccgcttgagccgacaatcgggtaggctgcgcctttatctgctctttttacgatagaagcggaagtcgaggccgagctccttaagttggtgccgccgtaaacaatatacgcttttttcgaggagcctgagcccgcagaaccgtcccccgagccggatgcgctgtccgatgagtcagaatcctttatgatgtagtggcttgctgcccagcctttttgcccgtttgcttcaattttcagccagccgtggtcttcacttaagatggaaacctttgttccgcgtgataatttagtcataatcgctgaatcatgtgacgctgcacttctgacattcaatgaagaaacgccgacagtcccgttttttgacccgcttcgggcggaagtggctttcgtatccgatccgccgctgtccgcggtgacgtattcggaagaaacccatccggttgtgccttgataagaaatgttcacccatccgctgttcttgtccagcacggatgcatgtgcgccttgcggaagtttgccgatgacttcatatgatgtccccgggccttttctgatgcggaggtcaggatcggtggaagtgaccgttccgcttgttgcggatgaatggtctgctcctccggctgtttttgatatcagccaggaaacgacccatccggttttaccggggctcagctgaagctgcacccagtctccctcttctttagcgatcgggtatctttcccctttttttacttcagccttaattccatagctcaggccgggaccgcctctgacattgatcttgtctgtcgcgatgaccgcttctccctctgcggcgattgcggtgtggaatgacggaagaagcgctgtgatgatgacgccgcataaaataagagcaagagttctcttcttcatggctgtcctcctttctgaactaactaaaatacattcttgtataatatcgtattttccttgctgaatgttaaataaaaataaaatggtttgtttatactagtcataaatacagcgaaaaggtgtgcaaatcatgaaatatcaaccaaaaatgggacgcgcgctgcacgatgcggaaggaaatctgcacttcagtgatcagagcgatagagaaaaggcgggttttcttgaagagacggcgacggagttcggtcttttatcgaaagatgcggtcgcaaggaaaaacagacggaataaaacttgacaggggagtgcaatcccattattataatagaaattgatgtacataagtcatgataacgattttgaaccgataatggagaagagtaggtcagaatgcatggagaagagaggaaccgtcccgggctgaaagcggatccgcactgcatctttctcgaaacaacactccggaggttccctgctgaacgcttttgcaagtcattaggcagcggacgtgaacctgcgttaaaggtcagagcggggatgcttcggcattccaactagggtggcaccacgggtataactctcgtccctactatacatgtatagtaggagcgggagtttttttatttgaagaaagacattaaggaggcctgtaacatggcatatcacattccaagaggcacacaggacatactgccgggtgaatcagacagatggcagttcgtcgaacaaattatgagggagacgtgccgcacttatcaatataaagaaatccgcacgccgatcttcgaacatacggaattgttcgcaagaggcgtcggtgagtctacagatatcgtgcagaaagaaatgtacacgtttgaagaccgtaaagggagaagcctgacgcttcggccggaaggaacggccgccgcagtccgcgcgttcaatgaaaataaattatttgcgaacccggtgcagccgacgaagctttattatgtcggaccgatgttccgttacgaacgtccgcagacggggcgtttccgccaattctatcaattcggaattgaagcgatcggctccaaagatccggccgtggatgcagaagtcattgcgcttgcgatgagtatttaccgtaaagccggtttgaaacatgtcaagcttgtgctgaacagccttggtgaccaggagagccgcaaatcctaccgggaagcgctcgtcaaacattttgaaccgcgcatcgcagagttttgctcagactgccagtcgcgcctgcacacaaacccgctcagaattcttgactgcaagaaagacagagagcatgaactgatgaaaacggctccgtccattcttgattacttaaatgaagaatcagccgcttattttgagaaagtaaaacaatacttaaacgatctcggcatcccgttcgaaatagatccgaaccttgtcagagggcttgattattataaccataccgcttttgaaattatgagcaatgccgaaggattcggagcgattacaacccttgccggcgggggccgctatgacgggcttgttgaacagatcggcggacctgaagcgccgggtatcggatttgcgatgagcatcgaacgtctgctggcagccattgacgctgagaaaacagagcttcccgtcaatcaggggattgactgctacatcgtgacgctcggagaaaaagcgaaggattattccgtttccctcgtgtacaaactgagagaagcgggcatctcaagtgaaatcgattatgaaaataaaaagatgaagggccaatttaaaacagctgaccgtctcggcgcacgttttattgcgattttaggggaagatgagcttgcccaaaataaaatcaatgtaaaagatgcggaaacaggagagcagcgtgaagtggtgttagacgagctgatacaagtgttaaaggcagatcaaaagcagtgaaggagaggaacgctatgtttggaagaacatattattgtggcgagataactgaaaaagcgattggcgaaaccgtcaaactgaaagggtgggtgcagaagcggcgcgatctcggcggcttgattttcattgatttgcgcgaccgctcgggtattgtgcaagtcgtgttcaaccctgacgtatcgaaggaagcccttgccgcagcggaagcaatcagaaacgaatatgtgcttgatatcgaaggcacggtttctgcccgtgaagaaggcacggtgaatcccaacctgaaaaccggtaaaattgaaatcaaagctgaagcggtgacggtgctcagtacggcgaaaacgcctccgtttccgatcagtgaccaggcggctgaggtttctgaagacgtccggttaaaacaccgctatttggatttgcgccgcccggcgatgtttcaaacattgcaaatgcgccaccaagtcacaaaatccatccgccatttcttggatgaaaacggatttcttgatattgaaacaccgattttaacaaaaagctctcccgaaggcgcccgtgattacttagtgccgagccgggtgcatgaaggggaattttacgcccttccgcaatcgccgcagatttttaaacagcttctgatggtgtcgggctttgaacggtattatcaagtggcccgctgcttccgcgatgaagacttgcgtgccgaccgccagccggaatttacgcagattgatatcgaaatgtcctttatgagtcaagaggacatcatggctctggcggaagagatgatggcgaaagtcatgcttgaaacaaaaggtgttgaagtaccgcttccgcttccgcgaatgacatatgaagaagcgatgaacagctacggttccgacaagcctgacacccgcttcggcatgctgctgacggacgtgtcagacatagtgaaagatactgaatttaaggtgttctcatcagccgtggcaaacggcggcgttgtaaaagcgatcaatgtcaaaggcgctgccggcgactattccagaaaagatatcgatgcgctcggcgtttttgccggaaattacggcgcgaaaggtctcgcctgggtgaaagttgaagccgacggcgtaaaaggcccgattgcgaaattctttgatgaagagaagcaggcaaaactggctgaagcgcttgatgcttctgaaggcgatctgctcctgttcggcgctgataagtttgaggttgtggcccaatccctcggcgcgcttcgcttaaagctcggcaaagaacgcggcctgattgacgaaagcctcttcaacttcctgtgggttgtggactggccgttactggagcatgacgaggaggaaggccgtttctatgcggctcaccatccgtttacaatgcctgtccgtgaagatcttgacctgattgaaacggcgcctgaagatatgaaagcgcaggcttacgaccttgtcttaaacggctatgaactcggcggaggctcaatccgtatttttgaaaaagacgttcaggaaaaaatgttcgggcttctcggctttacaaaagaagaagcggaggaggagttcggataccttcttgaagcctttgaatacggcgcccctccgcacggcggaatcgcgctcggcttagaccggttggttatgcttcttgcaggccgcacaaacttaagagatacgatcgctttcccgaaaacggcaagcgcaagctgccttcttacggaagcgcccggcgaagtgagcgacgcccagcttgaagaacttcacctttctgtcaaaagaaaagtgaaacagtaaagatcagcagtttgtttcttgaaaatcaaaatctgctgtgatatgattttgacaagttaaataaagtcctgatgtgttagttgtacacctagttttgaccgaacatttttttgatttgggagcccgtatttttaaatggcgtacatgcctcttttcattcgttaagaggacttacaagatttaaaaaagggcacccacctgctgagagcgggttcaaaacgaaggaaagctgcaacggcacaattgggactttattttttgtgcgctaaaaccagcggctttttgacaagccgagtttataaaaccagaatgtggagtgaggttcttgttacatcagttttccagaaatgagctagcgattggaaaagaagggctggacacgttaaaaaacagcacggtggccgttctcggcgtcggcggagtcggttcattcgcagccgaagcattggcgaggtccggagtggggcggatcgtgcttgtcgataaagatgatgttgacattacaaacgtaaaccgccagctgcatgcgctcttgtcgacggtgggacagccgaaaacagacttgatgaaagcgcggatcgcggatattaatccggattgcgatgtcgtcgccttaaaaatgttttatacggaagagacgtatgagcagttctttgagcatccgctcgattacgtcattgacgcgtcggatacgattcattataaaattcatctgatgaaagaatgtctgaaacggaatgttccgctgatttcaagcatgggagcggcgaataaaacagacccgacacgctttcagattgctgatatttcaaaaacccataccgatccgattgccaaagtcgtccgcacaaggcttcgcaaagagggcattaaaaaaggcgtacaggtcattttttctgatgaaagcccgatcgtcatccgtgaagacgtcagaaaagaagtcgggaatgatgaagcgaaaatccgcaaagcgcaaatgccgccgtcttccaacgcctgggttccgtcagtggccggtctgattatgggcggacatgttgttatggagctcttaaaggacatcgacattaaacgggttaaagataaataaaaagaaaaacagccttcttcaggaaaggctgtttttttatttgaatccgccgtttacacgaaagattttggccggtatcaaaaaagacaagaacacatagggtgtccttgtccggttattttttctgcttcatcagtttttcatacacttgctttatggcggcttcaaatttccccgtttgtttcggtttatagtattgcttgttttttaacggatcaggtaaatattgctgttcgacccatccgttctcgaaatcatgaggatattgatatccgatcccgcgtccgagctcttgggcccctttatagtgggcgtcttttaaatgtttcggcacatcgccgattttacccgtcctgatgtctttgagcgcctcatcaacggctgagatggcggagtttgattttggcgagaggcataattcgattaccgcattggccagcggaattctcgcttccggaaagccgatccgttctgcggtctgaatcgcgctcagcacccgggggcctgcctgcgggcttgcgaggccgatatcttcataggcgatcacgagaagccttcttgatatgctttcaaggtcgccggcttcgatcagacgggccagataatgaagggcggcgtttgcgtccgagcctcggatcgatttttggaaggcagataagacgtcataatgcgcatcgccgtttttatcatgagtatagctttttttctgcagacattcttccgccgtctcccgtgtaatccggatcgtgccgtcgcttgattcctttgtggagagtacggcaagctcaagtgcgttcaaagcggagcggacgtctcctccgcacccttgcgcgaaatgatccatcgcgtcgtcgtccaccgaaacgctgtaggaaccgagcccccggtgttcatctgtgagcgctctttccaatgcctgcttgatcagatcgggtgttaacggttcaagctcaaatatctgggtccggcttctgatggccgggttaatggcatgataagggttggcggtcgtcgcgccgattaaaataatcatgccgttttctaaatagggcagcagaaaatcctgctttcccttatcaagcctgtgcacttcgtcaaggattaaaatgacctggcctgacattttcgcttcctgtacgacaatctccatgtcttttttattatgaatgacggcattcaatttcctgaatgcgatgcttgtcgatcctgcgatcgctgtggcgatggacgtttttccgatgcccggcggtccgtacaggatcatggatgataagtgctttgcacgcaccattctgccgatgattttatcttctttgaccaaatgttcctggccgataatgtcttcgatattggcaggccgcatccgatacgccaatggtttcatgaacatctctccttacatatacagggtaacggaaaacggacgattagaaaagcgaattgcggcgggccccgtgtttcaatgaaaattaggataagttatgttataataacagttggtctataagatactaaacagattattcatatccatttacttgtataaattaacaattagaattgactggggtgttcatattgaaaatatcgacaaagggaagatacgggctcaccattatgattgaattggcgaaaaagcacggagacggtccgacgtcgctcaaaagcatcgcccaaacaaacagcctttctgagcattacttggaacagcttgtatcaccgctgagaaacgccggactcgtaaaaagcatcagaggcgcttacgggggttacgtgctcgggggccagcctgaagagataacggccggagatattatcagagtgctggaagggccgatcagcccggtagaagtgcttgaggatgaagagcctgccaagcgggagttatggatccgcatccgcgacgctgtaaaagacgtgctggacagcacgacgttagaagaccttgcgagctacacggacggcgagcaggaagcttatatgttctatatttaaaccagaggtgtacagacaatggaacggatttatttagatcacgccgcgacttccccgatggatgagcgtgtgctcgaagagatgaagccccatttcttcggcagtttcggcaacccgtcaagcattcattcattcgggagagaatcccggaaatgggtcgatgaagcgagaacggacatcgcgcgcgaaatcagtgcgaaagaacaggaaattattttcacaagcggcggcacggaggctgataatttagcgattttcggaacggctgccgcccggaagaatgaaggaaagcatatcattacgaccgctattgagcatcatgctgtattgcacgcctgcgaaaagctggaagaagacggctttgaggtgacatacctcatccccggcccttcaggacggatcagtgcaaatcaggtgaaagaagcgctccgtgatgatacaatccttgttaccgtcatgtatggcaataacgaagtcggtaccattcagccgattgacgaaatcggagagctgttaagcgggcatcaggcctattttcacacagatgccgtccaggcattcggttatatgccgattgacgtgaaaaaaagcagaattgacatgctgtctgtttccggtcacaagcttaacgggcctaaagggacaggctttttatatgtaaatcaagaggtgaagctgtcaccgattcttctagggggagagcaggaacgaaagcgccgcgcggggacggaaaatgtaccgggcatcgccggcttaaaagaagcggtcgtcctttcaaaccgtgagagggaagagaaaacagcgaagtataaggagtttaagaacattatcatgagcacgctggaaaaatccggcgtcacagcggaggtgaacggagatgccgagaaatgcctgcctcatattttaaacctttactttcccggtgtgccggtggaagcgctgctggtcaatcttgacatggaaggcattgccgtctccagcggatctgcttgtacggcaggatccgttcttccgtcccatgtgcttacggccatgttcggaagtgagagcggcaggctgacttcgtcaatccgcctcagcttcggcctcggcaatacggcggaacaaatcgaaacagccgccgaaaagcttgccgccgtcgttaaacggcttgcttaaaacggcggacttacgtttttaatggagtgaatgcaaatggaaaaacggccggaggatacaagagtcgtagtcggcatgtccggcggcgtggactcttccgtggcggcccttctgctgaaggagcagggctacgatgtaatcggaatctttatgaaaaactgggatgatacggacgaaaacggtttttgcacggcgacggaagattatgaagacgtcatccgggtctgcaaccagatcggaattccgtattatgccgtcaattttgagaagcaatattgggaaaaggtatttcaatatttccttgatgaatataaagccggaagaacccccaatccggatgtcatgtgcaataaagaaattaagtttaaggctttcttggatcatgctctgtcactcggcgcggattatcttgcgacgggccattacgcccgcgtggacagaagcgcaggtacagtgcgcatgctccgcggtctggatgaaaacaaggaccagacttattttctgaatcagctcaatcaggaacagctcagcaaagtcatgttcccgatcggtgatctgcaaaaaagccgcgtgcgggaaatcgccaaagaagcggaacttgcgacagctgcgaaaaaagacagcacgggaatctgctttatcggcgaacgcaacttcaaaacgtttctcagccaatatctccccgctcagccgggcgatatgatgacaatggacggagaagtaaaagggcgtcatgacggtctgatgtattatacaatcggacagcgccacggtcttggaatcggcggaagcggcgagccgtggttcgccgtcggtaaagatcttgaaaaaaacattctgtatgttgatcaaggattccataatccgcttctgtattctgataagatcacggcgacaaatgtcagctggacgcgtcccggtctgatggacggcggcgaaatgacatgcacggcgaaattccgctaccgtcaggaagatcacaaagtaacggtgaaaatgacgggtgatgatgaagcggaagtcatttttgacgggcaggtacgcgccgttacgccgggacaagccgtcgttttttatgacggagaagagtgcctcggcggcggaacgatagatgacgtttataaagacggaacaaaactgtggtacgtataataacatgtaaaaaacctcaactcgcatgttggggttttttagcgaaaggaagttaaaaatggattataataaaatcgggattgacgccatgcaggagggcgattttgaaaaagcggcggaggcttttacgaaagcgattgaggaaaacgggcaagatccggtgccgtatatcaacttcgcaaatctgctttcttctgtgaacgaactcgaacgggcgcttgcattctataacagagcgctcgaattggacaattcggcggcagccgcttattacggtgcgggaaacgtatatgtgatgaaagaatcgttttccgaagcgaaggatatgtttgaaaaagcgcttcgctccggaatggaaaacggagatttgttttatatgctggggaccgttctcgttaaattagagcagccgaagcttgcactgccatatttgcagcgtgccgttgaattaaatgaaaatgacacggaagcacgcttccagttcggaatgtgcctcgcaaacgaagaaatgctggatgaagctctggcgcagtttgagacggtgatcgagcaggacccaagccacgcggacgcattttataatgccggggtcgcttacgcgtacaaagaaaatcgtgaaaaggcgcttgagatgctggaaggcgcaatcggcatacagcctgatcatatgcttgcgcttcatgcgaaacagcttatcacccagtcataacaaaaggagggaaggctcgtggatcagctgaacatcgaagaacagccgtatgtaaaaggcgtcattcatacggtcatttatcacaatgacaccaacctgtatacagtgctgaaagtcaaggttgcagaaacgtctgaggcgatcgaagacaaggtcgtatccgtaacgggctacttccctctgctgcaagaagatgagacctacacattttacggaaaaaccgccacgcatcctaagttcggcctgcaatttcaggctgagcactttaaaaaagaaattccgaccacaaaagaagggatcattcactatttatcaagtgatctgtttgaaggaatcggaaaaaaaacggcggaagaaatcgtcaaaaagctcggagacggcgcgctcaataaaattctgacggatgcgtcggtgctttacgatgtgccgaaaatgtcgaaaaagaaagcggataagcttgccggagagctgcagcggcatcaggggcttgagcagattatgatctctctgaaccaatacggtttcgggccccagctatccatgaaaatatatcaggcctacgaaacggaaacactggagaaaattcaggaaaatccttatcagcttgtaaaagacgttgaaggcatcggctttgtgaaagctgacgagctgggcggaaaaatgggtctgtcaggaaaccacccggagcggatcaaagcggctatcttatatacaattgaatcgacctgtctttcagagggccatacgtacatagaaacaaagcagctgataatcaatacgcaaacgctcctgaatcagtcagctgaaggcggcctcgtcacggaaatggatgcggctgacggcatcatcgccctcggagagagtaaggatatcgtcatagaaggagaacgctgctattttccgtccttgttttacgccgaacaaaatgtcgcaaaacgcgtgctcgacattgcggctcagacggagtatgccgatcaatttcctgaatcggaatttctgcttgcactcggtgaactggaagaacggatgaatgttcaatacgcaccaagccaaaaggatgccattcaaaaagcgctgtcttcaccgatgcttttactgaccggaggacccgggacggggaaaacgaccgttattaaaggaatcgtggaattatacagtgaactgcacggagtatcgcttgaccccggtgattataaaaaagacgaggcgttcccggtgctgcttgccgcgccgacgggaagagccgcaaaacggatgagcgaatctacgggtctgccggctgttacgatacacaggctgctcggctggaatggcgctgaaggctttacctacaatgaagatcagccgatagaagggaaactgatcattatagacgaagcgagtatgctcgatatctggctcgccagccatttgtttaaggcgcttcctaagcacattcagctcattgtcgtcggtgatgaagaccagcttccttcagtaggaccggggcaggtgctcagagaccttttggcttctgaggtgctgccgaccgtgcgcctgacagatatttaccgtcaggctgaaggatcatccattgtggaacttgcgcatgatatgaaaaaaggactgcttccaaaggggctgaccgcgccgacaaaggaccgctcatttatccgctgtaattcttcacagattaaagaagtcgtggatcaggtcgtctcgaacgcgttaaaaaaggggtatacctccagggatattcaagtgcttgccccgatgtacaggggaaaagcgggaattaacgagctgaatatgcttcttcaagacatcatgaatccgccgaaagaaaaaaggcgggagctgaaattcggagatgtcgtctacaggacgggcgataaaatattgcagcttgtcaaccagccggaaaacaatgtgtttaacggcgatatcggcgaaatcgtatccattttttatgccaaagaaaatacggaaaaagaagacatggtcgtcgtctcatttgacggcaacgaaatcacctttacgaaaaaggatttcagccagtttacccacgcgtactgctgttcgattcataagtcgcagggaagcgaattcccgattgtcgtcctgcctgtcgtcaaaggctactatcgaatgctcaggagaaatctgctttataccgccattacaagggcgaaaaaatttctgattctttgcggagaagaagaagcgcttgaatggggcgtcaaaaacaatgatgccaccgtcagacagacatcgcttaaaaacaggctcacagagcagactgaagagatggatgcagaactggccgccctgcaaaaagagctgccgttcagtgtatatgatgcgaacatcggaatggaaggcatcacgccgtttgactttatggaagaaaaagcgtaaataaaacccggagcataaacaagcgccgggttttcgcctgtggaagtcatttcaaagtatgctgcccggcttcttggcaaaacctatacgtgttcaacaaaaggtggttgatcacactttgagaacatgccatgcagctgaaggacgaacagtatatgacgaaaacaccgggcgcagtctcgggatgatatcggatgtatgtttctctctggacggccggtttctcggtttcgtgctggagcagaaacgcctgtttcataaccgccatctttttttagaggcaagtgatataaaagagatggatcaagaagccgtagctgccggtcatgctcatttgcagcctttgccgaagagctgtttcacctttgaacagattaagatgcagccggtgaaatcgcctgatggtgaaatgttcggtttgctggaagatgtatacttttgtttggacaggggcataatcgtagcatatgaactctcggacggcttcttttcagatctggctggcagacgccaagtgcgccgcgccgccgatacgcttattgaagcggggaaagaaggcatcgtcctgaacggataagaggtgtagtctgtgcttgtatgtccgaactgcaaaagtaaagatatcggcaaaatcggcgtaaaccaatactattgctggggctgcttcattgagctgacggtagccaaaggcaaaattgcgacacatcaagtagaggaagacggcacgttaagcagtcttgatgatttgttttctgaagacgaacgcagtatcaatttttaaagttgaaaggagatacgcgcgatgggcagaacaatgacctctctgttggctttaggagctggagccgttatgtatcgtatggcttctcagtccgatatgctgaataaaaaaggtatgaaacggatgagaagacgagtcatgaaaatgttttaagcagaaaaaaggatacttctccggaagtatcctttttacgtttgtctcgcttccagccgtctggctgcgagagacaggctgtaattgaccgcgaaatacatcagggccgccagcagaaagatcgggaaaaagtaccctccgtcagcgctttgtccgtttaaaatctgcgcgttatgaatcagttcgggcagagcgatgacgaccgcaagtgacgtatcctttaataaagaaataaactggctcacaatcggaggaaccatacgcctgagcgcctgcggcatgacgacgagaaaaagagtctgcgtgtacgtcagtcctgaagaacgcgccgcttcaatctgccctttgtcaacggattgcaaaccgcttctgatgatttctgacagcatggccgattcaaaaatcgtaagcgccgtgatggcagccgcggtaatttccagtttgatcccgatttccggaagggcaaaaaacgtaaagaaaatgattaataacagcggcaggttgcggatggtttccacaatggccgctataatgcccgagacgataggaattttcgcatagcgcaaagtgccggcggcaagcccgaaaataaaactcaggacaatggagatcagcgcaacataaagtgtgaccaaaaagccgtcccataaaaacagcagatggtcaggtgtataggcgccgctaaaatccatgtttttcactctccttctctaataactctttccgagacgtctttccaaatagtgaaccccgatgctgagcgggatcgttactatcaaataaaaaagcgcgacgaaaatatagacatcaaacacgacaagagtgcttgaggaaacgagatccgcctgatacatcaaatcgagtcccgccaccactccgagtattgatgagtttttgacaaggttgagaaattggtttccgagcgggggaatcacgatttttacggcctgaggaagaatgacgtatctcatcgcctgactgtaggtgaagcctgacgatctggccgcttccatctgccctttggagacagtctgaattccggctctgatggcttctgcgataaaggccgacgtgtatatcgtcagcgcaatcgttcccgcctgaaagccgtccagtctcagcccggcgttcggaagtccgaaataaaaaacgaatgtgatgaggagaagcgggatgttgcggataaattccacatacgcagtgccgatccattgaaggggtttgaaagccgtgattctcatgactgcgatcagaacgcccagcgcaaagctgcctgccagcgcgatgaagctcgcaagcaatgtgtgcaggaaaccgtccatatacatatcgaagttttccgttaaaattgaaaagttcatctatgtcactccttataaaacggggatgagcatgcctgctcatcccgcgatcctttctattttgccggttcttctttaatccattttttatagattttttcgtacctgccgtcggctttcatttttttcaaagaggcgttgatttccttgatgagtccggattggccttttttgacggcgattccgtaaggttcatcggtgaaggtttcgcctgtcagctgatattgtttattttcatctgccatgccgtataaaatcgcattatcagttgtgagcgcatctccctgtcccgctttaagcgcagtgaacgcttcggcgtaattttcaaattccagcactgaggcgtcaggcgctttttctctgatgttttgtgaggaagtagagccttttaccgccaatacttttgagccttttcccaggtcttcggtgcttttgatgctgcttccttttttgacgagcagggattgcccggcttcaaaataaacatctgagaaatcaacttcttttttccgctcatccgttatcgtcatcgtggcggtgatagcatcgatatcgccgttttgcagcatcggaattctcgtttttgacgtcacttctttaaattccgctttcttctcatcccccagaatatcttttgcgagctgttttgagatatcaatatcgaagccttcaatatcaccggagcttgggtttttcagcccgaataacctcgtgtcggttttgacgccgaagatgattttgtctctgtctttaatagaggctaacgtgtcttttcccgttccttttgaatctccggacgtttctttccctccgcaggcggccagcataaagacggccagcagtgatatcaacccgaatgacaaccattttgttacacgtgacataagcactcctccgtttcttttcagtgatttaaaatacggcttaagaataaacgcgccctctcttcacgtgggctttcgtaaaattcagccggtgcagcttcttctaagatggctccgccgtcgataaacacgatgcggtccgccacttcttttgcgaatcccatttcatgtgtgacgactgccatggtcatgccttcctttgcgagtgttttcatgacatccagcacttccccgatcatttccggatcaagcgcggatgtgggttcatcaaacagcataatttcgggcttcatcgcaagccccctggcgatggcgacacgctgctgctggccgccggaaagctgtgaaggataagcgtccgctttttccggtataccgacttttttcaaatagtataaggccgtttcttttgcttcttcttttgattgcttaagcactttgatcggtgcgagcatgatgttttgcagaacggttttgtgcgggtacagatgaaaatgctggaacaccatgccgatattgcggcggaccttatttatatccgttttcttgtcatggatggagacgccgtttaccgttaaggcgcctccatcaactgtttccagctgattaatgcagcggagaagcgtgctttttcccgatcctgaaggtccgatgataacgacgacttccccttttttaatgtgcagattaatgtttttcagcacgtggaaatgtccgtagtgcttatttacatcctgaaatgaaatcatggccatcctccttaaaaaaacatgagtcatattgactggacagtttttgaaatcctttaacacattacgatggttatacagatttttatgaatattatttagattatttcgtaatttctgataattttttccgtcaagaggtctgcgtcataaggcggagtttatgaaacgggaataattccggctttctgtcaaaagataaagcaagaggtgaaacgtcatgcttcaaaaaccgctgcagctcttaatgtggacggctgtatgtctgctcgttttgttaacagtgtatgtcttttgcatgctcgatatgttatggtctcccatttggcttgttataaaatctctctttattcctatattcatcgcagtatttattgcttatcttttacttccgattactgaatggcttcatagaaaagggatgcctagaactttaagcctgcttctgatttattgcctgtttttcggcggaatcggctggggggtttataaaggggttcctgttttaattgaacagctgcaggatctgtctgagagcattcccggtcttgccaaaaactacaacagcatgctgaagcatctgcataatcacacggatcattggcctgacggcatgcaccatcgaatggacaaaatgattcagcagacagaaacgtttcttgccggcacgattgaaagcacgatcagaagcatccgtttcgtgcttgattatatcctgatcgcggcgacgattccttttctcgtgttctatatggtgaaggatatagacgtcatgaaaaagacagtctggtatttgacgccgaagtcctggagaaaaagggggagtgaatttctgcgggatgtggacgactctctcggtgattacatccgcggtcagcttctcgtttgttttttgctcgggctaatagccggcgtttcattttggctgttcgggcttccttacccgctgattttgggccttgccatcgggattacgaatgtcatcccgtatttcggtccgtttatcggcgctgtaccggcgctgctccttgcgctggcgatttctgctaaagctgtgatcatcgtaatcgtcacgatttttattctgcaatttatagaaggaaacattttgagcccgcttattgtcgggcgcagtctcagaatgcaccccgtcgtgatcatgctggcgctccttgccggaggagagctcgcgggcattcccggcatgattctcgctgttccggcggcagccgttttaaaagtgacggccatacactttttgcggatcaggacggaacattgacattcgggttctgcttgtctataatttcgagtagaatacatacgaatctcgagtgacggatatgagtacgccgaagccctgtttaagagagaagctccgatacgctgaaaggagcttcagcagaagatcggcggaagctaatcctgagtgcagttaaaggctgccgcagtcctgcgttacgggatgaaaggtgacaggcctttttcggcctgtaatcagggtggtaccgcgagacagctctcgtccctgtgtgaacgcatggtttgcatagggagagagcttttttgctgtcgcaaaagagaatttcgggtagtgataaggaggaatatagatgaaacacttaacttctgctgaagtgcgtcaaatgtttttagatttctttaaagaaaaaggccatgccgttgaaccgagcgcctcattggttccgcatgaagatccgtctttattatggatcaacagcggcgttgcgacgctgaaaaaatactttgacggccgcgttgtgccggagaatccgagaattgtaaacgcgcaaaaatcaatccgaacaaatgatattgaaaatgtggggaaaacggcgcgccaccacacgttctttgagatgctcggaaacttttccatcggtgattattttaaagaagaagcgatcacgtgggcatgggagtttttaacgagcgaaaagtggatcggctttgatccggagctgctgtctgtaacggttcaccctgaggatgaagaagcttatacgctatgggcggaaaaaatcggcgttccggaagaaagaatcatccgtctggaagggaacttctgggatatcggcgaaggcccgagcggaccgaatacggaaattttctatgaccgcggcgagaaatacggcaatgacccgtcagattctgaattgtatccgggcggcgaaaatgatcgctatcttgaagtatggaacctggtattctcagagttcaaccacaacccggacggcacgtacacaccgcttccgaagaaaaacattgatacgggcatggggcttgaacggatggtctccgtgattcaggatgtcccgacaaactttgacactgatttgtttatgccgattattgaagcaacagagcgcatttccggagatgcttacggaaaggatgcagtgaaggatacggcctttaaagtgatcgccgatcatatcagaacggtcgcatttgcggtaagcgacggggcgctgccttcgaacgaagggcgcgggtatgtactgagacgcctcttgcgccgggcagtgcgttacgcgaaaaccctcggtatcagccgtccgtttatgtacgagctagtaccgactgttgcaggaattatggacgctttctatccggaggtgaaagaaaagcaagagtttatcgccaaagtcatcaaaacggaggaagagcgcttccacgaaacattaaacgaaggtctggccattttatccgacgtgataaagaaagagaaggaaaaaggcagcggcatcatctccggaaaagacgtattcaaactgtacgatacgtacggattcccggttgaattgacggaggaatacgcggaagatgagcaaatgacggttgaccataaaggctttgaagccgaaatggaaaaacagcgtgaacgggcgagaaatgcgcgccaagatgtaggaagcatgcaggttcagggcggcgcattgcgcgatattaccgcagaaagcacatttgtcggctacagtgccgtaaaagctgaagcgaaggtgatcgagcttcttcatgacgggcaattaatcagcgaggcgcatgaaggggataccgtccaaatccttcttgacaaaacgcctttctatgctgaaagcggcggacagatcggtgacagaggagtgctgagaagcgagcaggctgtcgtaaccattaaagacgtgaaaaaagctccgaacggtcagcatgtacacgaaggcacggtggctagcggcacgattcaaaaaggcgcaagcgtgacggctgaagttgaagatcaaatgagaagcggcgtggtgaaaaaccatacggcaacccacctcctgcaccaggcgctgaaagacgttctcggcacacatgtcaaccaagcgggttcactcgttaccgaaaatcgcctgcgttttgacttctctcatttcggtcaagtgacgaaagaagaacttgaacgcattgaaggaatcgtcaacgaaaaaatctgggagagcattccggtagcgattgatttgaaaccgatcaatgaagcgaaagaaatgggcgcgatggccctgttcggcgagaaatacggcgatattgtccgcgtcgtacaagtcggagattacagccttgagctttgcggcggatgccatgtcacgaatacggctgaaatcggcctgtttaaaatcgtatccgaatcagggatcggcgcagggacgcgaagaattgaagccgtaacaggaaaaggcgcttatcaggaaatgaacagccagctcagccttctgcagcacgctgcggacgagctgaaatcaaacgtaaaagacgtaccgaagcgaattcagtctcttcaagcggagctgaaggaagcgcaaagagaaaatgaatcattgctcagcaaacttggcaatgtggaagccggagccattctgtctaaagtaaaagacatcggcggcgtaaaagtgctggctgaaaaagtaaatgcgaaagacatgaaccaccttcgcactatggtggatgatctgaaagcgaagctcggttctgcggtcatcattctcggcgccgtgcaaaatgagaaagtcaacctttcagcaggcgtgacgaaagacctgatcgaaaaaggccttcatgccggcaaaatggtcaaacaagcggctgaagtctgcggaggcggaggcggaggccgtccggacatggcgcaggccggcggaaagcagcctgaaaaattggaagaggcgctggcatctgcggaagattggataaaatccgttttataatcctttcaagtagtgtagaatgatgataagatgaggacctcaggctgaactttgcctgcgaatttgggaaagaggtgcaaaacggtgagctcgtttgataaaacgatgaaatttaatttctccgatgattctgctgaaacaaacgtcgaagaagtgctgaatacggtatatgatgcgcttcaggaaaaggggtacaatcctatcaaccagattgtcggatacttgctgtctggagatcctgcatacattcctaggcatcgcgacgcccggaacttaattcgcaaactggaacgtgacgaattaatcgaggaattggtaaaatcctatctagaacagcataaagaggcgtaaatacattcatgagaatattgggacttgatcttggaacgaaaacactcggcgtagctttaagcgatgaaatgggctggaccgctcaaggcattgagacgataaaaataaacgaggctgaaggagattacggtctggaccgtttatccgagctgatgaaagactataatgtagagaagatcgtgctcggttttccgaaaaacatgaacgggacgatcggtccgagaggcgaagccagccaaacatttgcgaaactgcttgaaacagcgtacaatgtccctgttgtgctgtgggacgagcgtctgacgacgatggcggctgaaaaaatgctgatcgcggctgacgtcagcaggcaaaaacgaaaaaaagtcattgataaaatggcggctgtcatgatccttcaaggatatctggacagtttaaactaagaggtgaaaaaaatggaacacggcgaaaaacacattacaattgtcgatgatcaaggcaacgaacagctttgcgaagtgctgttcacatttgaaaacgacacattcaacaaatcttacgtactttattatccgattgatgctcaagacgatgatgaaatcgaaattcacgcttcaagcttcgaaccgaacgaaaacggtgaagacggcgaactgatgccgattgaaaccgatgaagagtgggaaatgatcgaagaaacgctgaacacgtttttagcggaagaagacgaagaataaaatgaacggaaaaagccggagcgcatatgcgcttcggcttttttttgtaataaattgccgaatgcacatgaatcatgtagtataagagctgttgggaggaaaatacttgtatgaatatcaatcagactaaacattcatttccgcgtaaaaacaaaaaaacgacgataatactgtcctccgtgatcgctctgcttatcatcatttgcggtgcttttttctatggaaaatctctgctgtccccggttgacaaaggcagcaaaacggcagtcaatattaatattccgagcggttcttccgtttcggcaatcgctgaaattcttgaggatcagcatgtcatcaaaagcaaaaaagcatttcagctgtatgtgaagtataaaggcgcttccgggtttcaggcgggattttaccacctgaataaaggaatggatgcggatgcgattatcaaaaaactgaccgcgggatcaacgggatatgcctttcagatctccgttcctgaaggaaaacagcttacacagattgcggatgcgatcgcaaaagaaacatcatattcaaaagaagagatcatggcgaaactggatgacaaaacattcatcggcaaactgaagaaacagtttcctgatacgataacggacgcactttcaaacaagaagctcaagcatccgctcgaaggctatctgtatccggccacatatccgtttaatgatccggatgcatcgcttgacacgattttgacggcaatggttcaggaaacaaacacccgtatcgaaacgtataaatctgaactggaaaaaaagaaactttccgttcataacgctctgacgatggcatcgcttattgaagaagaagccaccgccaaagccgaccgtcacaaaatcgccagcgttttttacaacaggctcgaagaaaaaatgccgctgcagactgacccgacggtattatatgcggccggtaagcataaaagccgggtctactacaaagacctgaaaattgattctccgtttaatacgtataaacataaggggctgccgccgggaccgattgcaaatgccggtgattcatcatgggaagcggctctccgccctgacaaaacggattatctctatttccttgcaaaatcaaacggcgaggtcgttttcaccaaaacattaaaagaccataataaagcgaaggaaaagtatatttccaaaaaagacagcgaataaaaggagggcaaaagctctccttttattccattctgaaaggttttatgataaaatatatcgggttgtttacttatggataaagaagtgtcttaagagagtgtccccgcggattcgtcaggggcactcctttttagaacggaggctgtttgccgtgaatgatcggtatgaacaaataaacgagtatataaacgcgatgctgaagcctcggcctgataaagtgaaaaagcttgaagcctatgcaaaagagcaccatgttccgattatggaagaagcgggcattgaagtgctgcttcaaatgctgtcgattcaacaggcgaaaaacattttggaaatcggcgcggcaatcggatattccgccatacggatggcgcttgagcttccggatgcgaatatttacacgattgaacgggacgacaaacgctatgaagaagctgtgaacaatataaaagactttgaaatggaaaaccggattcacgtaatgcacggggatgcgctggatctttctgagtctgtccgtgtcacggctccttatgatgccatttttatcgacgcggccaaaggccagtacacgaacttttttgagctctatgaaccgatgcttgcgccggatggagtcatttttacggacaatgttctgtttaaagggctggtggcacaaaatcactcggacattgagccgaaaagaagacggaagcttgttgaaaaaattgatcaatataaccaatggctgatggaccggcctgactatcaaacggtcatactgccggtcggagacggcatcgccatcagtaaaaagaagaggtgaaggatcatgaaaaaacctgaacttttggtgactccgacttctgtacaggatattcttccgctcattcaagcgggcgcaacggccctgttggtcggagaacagagatacggcctgagactggccggtgaattttcaagagaagatataaaagaagccgtaaagacagctcatcaggaaggcgcgaaagtgtacgccgccgtcaatgctatttttcacaacgaaaaagtggacgagctgaacggctatcttgcctttttgcaggaggccggcgttgatgcggctgttttcggtgacccggccgttttaatggcggcgcgtgaagcggctcccgagcttaaactgcattggagcacggaaacaacgggaaccaactactattcctgcaattactggggacgcaaaggcgcacggcgggcagtgctggctaaggaattaaatatggacagcatcattgacataaaagaaaacgccgaagtggaaattgaaattcaaatccacggcatgacgtgcatgttccaatcgaagcgttctttagtgggccattacttcgaataccaaggtaaagtcatggacatcgaacagaagaaaaaagaagcggggatgtttctgcatgacaaggaacggggcaataaatacccgatttttgaagatgaaaacggcacgcacatcatgagcccgaacgatgtgtgcatgattgatgaattagaggacctgatggacgccggcatcgattctttcaaaatcgacggagttttgaagtctcctgaatacttaactgaagtgacccgcatgtacagagaagcaatcgatttgtgcttcgaaagccgagagacatacgaagagaaaaaagagagctggatagagcggattgaaagcattcagcctgtgaacagaagcatcgacacaggattcttctttaaagaaacggtctattaaaaaggagggtgcaacggatgacagccgtaaatcaaaccatttccaaagtcgtaaacggaaaacgcgtcattacgaaaaaacctgaactccttgctccggcaggaaaccttgaaaaattaaaaattgccgttcattacggagcggacgcggtttttatcggaggacaggaatacggactccgctcaaatgcggataacttctcaatagaagaaattgcagagggcgtagaatttgccaaaaaatacggggcaaaaatatatgtgacaacaaacattttcgcccataatgaaaatatggacggtctggaagaatacttaaaagcgttgggagacgcaaaagttgccggaattatcgtcgctgatccgctgattattgaaacatgccggagagtggccccggacgtagaaattcacctcagcacacagcagtccctttccaactggaaagcggtgcagttctggaaagaagaagggcttgaccgcgtggtgcttgcccgtgaaacgagcggactggaaattaaagaaatgaaggaaaaggtggatattgaaattgaaacctttatccacggcgccatgtgtatcgcttattcaggccgatgcgtgctgagcaatcacatgacggcccgggattccaatcgcggcggctgctgtcagtcctgccgctgggattatgacctgtatcagacagacggtgcaaacgcggtcgcgctctatgacgaagaagacgctccgtttgcgatgagcccgaaagatttaaaattaattgaatccattccgcaaatgatcgagatgggcatcgacagcctgaaaattgaaggccggatgaaatcgattcattacgttgcgacggttgtcagcgtgtatcgcaaagtcatcgacgcatactgcgctgatcctgaaaactttgtcattcaaaaagaatggctggatgagctggacaaatgtgcaaaccgggataccgcgcctgctttctttgaaggcacgcccgggtatgaagagcagatgttcggcgaacacggaaagaaaacaacatttgattttgccggtctcgtgctcgcgtataacgaggaaactcaaatggtgacgctccagcagcgcaatttctttaaacaaggtgacgaagtggaatttttcggtcctgaaatcgacaatttcacattcacaatcggcactatttgggacgaagacggaaacgagcttgatgctgcccgccatcccctgcaaatcgttacatttaaagtagacaaaaagatttatccgagcaacatgatgagaaaggggaagtaatcaccaatgggtaagagtcctgtagttataggcatcgcaggaggttccggatcaggaaaaacaagcgtcacccgttccatctatgaacagtttaaaggacactcgattttaatgatccagcaagacctttattataaagaccaaagccatcttccgtttgaagaaaggctgaacacaaactatgatcacccgctcgcatttgataatgactatttaatcgagcatattcaagagcttttgaattaccggccgatagaaaagccgatttatgattataaactgcatacgcgttctgaggaaaccattccggttgagccgaaggatgtcatcattctggaaggcattctcgttctcgaagataaaaggcttcgcgacctcatggatatgaaactttatgtcgacacggacgcggatctccgtatcatcagacggattatgagagatattaacgaaagaggccgttcaatcgattctgtcattgagcagtatgtgtccgtcgtcagaccgatgcacaatcagtttgttgaaccgacgaaacgctacgcggacatcattattccggaaggcgggcaaaaccacgtcgcgattgatctgatggtcacgaagattcaaacgatccttgaacaaaatgcaattttgtaataccatagcatagacataaataactcagaccatattatgtataggctggaagggaatgagacagttcccttctttccctgtttataaaccgaaacatttgcagaaaacacacattcagtttaagataaacagtacctatatgggagagaagaacgaggactgccctgtgttctcattcttgattttttcgtttatgctctcatacataatcacacgttattgttgagggacaaccaccaaggagtgaaggaacatggcacaagaaaaagtttttccgatgactcacgaaggaaaacaaaaacttgaacaagaattagagcaattgaaaacggttaaacgcaaagaagtagtagaacgcattaaaatcgcaagaagcttcggagatctgtcagagaactctgagtatgattctgcaaaagaagaacaggcatttgtggaagggcgcatcacgacgcttgaaaacatgatccgcaatgcgaaaatcatcgaggacgacggcggttcaaatgtagtcggtttgggaaaaaccgtatcattcatcgaattgccggacggtgaagaagaatcttacacgattgtcggaagcgctgaagctgatccgtttgaagggaaaatttcaaacgactcgccaatcgccaaaagcctgctcggcagaaaagtggacgaagaagtgacagttcagacgccgggcggagaaatgctcgtgaaaattgtgaaaatttcataagatccgtttaacattgaaacacctcgtccaaaatgtggatgaggtgtttttttatgatcgtatcaaaaaggctgaaagcggccgtgatttgttttctgctcgtgtttttctttctgcttgcgaggctggctgaaattcagctgtttttcacagaatctttttcaaaatccaatattaatctgattcaggaaagcgtcaagcagcggacggaagaagtccttatttcagacggacgcggctcttttcttgatcggaacggcaaagaactgaccggaaaaaagcagcctgccgtcatactgtttccctttctcgtgacgcaggattggccggttgaccgggtatcagacattctcggaatgaaacagggggagctcaggcagctgctcacggaagcgaaaaaaccggtggtcctgaacagcagaaaaataaaacatttgacgaaacaatccgtgtcaaatatcaattctttgaaatatcccggcatttacggcgtatatatgaaagacagcaaagaaacaaacatagccgctcatctgttgggcgcgacaaaccaggaccctgagcttttgaaaaagaaataccccggcaggaaggaactgccgatcacggcaaagatcgggacaagcgggatggagcggacgtttgatgagtttttactggcggatcaggacacaaaacttttgtatcatgtcgacggaaggggaaaccctttattcggaatggacgtcaaatatacggctgaagcaaacgcgttttatccgctgcaagtcaaaacctccatcgaccgcaatattcaaaaagcaatggaagatgtattgaaagaccgcgggttaaaaaaggggggagccgtccttttagacattgaaaaaagcagtgtgctcggaatggtatcaaagcctgacgccgacatgtcaaagcagcagacactgcaaaattacatgctgacgccgatttatccgggatcagtatttaaaacggtgatcgccgcagccgcaatagaacaaaacgaagtgaagccgggcacatcctttaactgcaatctcaacctgtacggagagccgggggatgacaaaggcacgctcagttttggagaaagctttgcccaaagctgcaattatacgtttacaagccttgcggaaaaattgatcaaaaaagatgattccgttattgaaaacatggcggaaaaactcggtctcacccagcgggcggggtgggaaggcaagctgtaccgggaagacggattcaggcagctgtataatgaaaaaagcggggtcatttggggagatgacaaagacaaaaccgtaaaaaaagccgtcgcacagacggcgatcgggcaaaaaaacgtgaaagtcacgcctcttgaagtcgccaatatgatggcggcgatcgcgcgcggcggtgaaaaaaaacaagtcaaaatcgcggacaaaattgaatacaaaaacaaaacgacaatggcgtcattcaaagaacagccgttaaaaggggaaaacatcgacaaatatacggcgcagcagcttcaaaaaattctcagagaagtcgtcacctcaccgaaaggaaccggccgaaggtttcaggacctgccgtatgagatagcaggcaaatcgggaacggcccagacgggaatgttcacaaaagaaaaacagacgctttaccacaaatggtttgcgggatactttcccgcggacaagccgaaatacgctctcgtggtgctgcacatggacacgccgggggataaggctctgacaaatacagtgttttatgatattgttaaaaaggtacatgaaaatgaaataaatcagacatagaacaaccgctcagcccatgttaaaatatatgctgagcaagagggataaaggagtgcagaatgattgagcaataaacaatctcgttttgaaaaccgtgataagcgcagaaaagcaaatatggtgcttaacattttaattgctatcgtatctattcttattgtcgtcgttgccgtcagcctcttcattaacagtccgtcgagcgacgtgagcgaaaaagcggacacgagccagaagcaggaaacacctgcatcaggcaagacgaagcagacatccgatgaagacataaaagacagcaaaaaagatacggcatcagacgatgacaaaaaagataaacaggataaggacacatctgattcatcttcagactctgacagcaaaaaagaagatgattcatcgaaaagtgatgacagcagcaaaaaagactctgattcaagcgatccttttaaaggcgcaaaaataacagagggcggctcatcaagcgatgtcgagaaaacaattgttaacccaaaatggaaagcggtcggcacaaagcagacgggagaacatacggcgacgtatgactcaagctctgaagactggtccgaaatgcttgacgccatctcttacgcaacaggcgtgtcaaaagatcatatgacagtgctgtggctcggaaacaatggaagcccgcaagatgcgaaggggaaagttttagacaaaacgaacggcaaaaagtatcaggtcaccatcacttggaaagacaaaaaaggctggaagccgacaaaagtagaaaccttaaaataaccgcaaaaaagcagctgattattcagctgcttttttctgtcatacgtcagctgaaaaatgcaccgacgcgctgtaaaggattctgccgtcaacggccgtcacctgatgggatacggaacggacgcgaagcataatcgcctggttgttttcaatctgaacgtttattttcttttcaagctcctgcaaagatgccgcttcgaaaaattctactttatctttgattaaatccaattgaaaattcatcagtacagatcctcctgatttttcttctgagtcaatgaaagtataagcctttctgccgtaattgcgcaataatcccaaagtattttagtacccttccattcttttttgtgataggataggaactgttccacgattaatccatactatactcataggaattataaattatggagagtgaaaaatatgggccgtgaatttattcctttatttgaagattgggcagcgacttatgatgccacagtgcacggggctgacaaacaatatgccgctgtttttaaaggatatgacaacattcttgacagcattgtcgcactttcaggttcaaacgttttagagttcggaccgggaacggggaatttaacggcgaaattagccgccgcgaacaaaaaggtgtttggtgtagaaccgtctccgtcaatgagaaaactggcggctgacaagctttctgacaaagccgtgttcagtgacggagattttctggagtttcccgctccgccttttcaaatagataccatcgtcagctcgtacgcctttcatcatttaaccgatgaagaaaagcgaacggctgtaaagcagtatggcgcaatccttcagaagcatgataaaatagtgtttgccgatacagtctttaaagatcatgaagcttatgatgtagccattaaaaaagcaatccgaaacggctatcatcaattagcggacgatttaaagacggaacattatccgacactcgggacaatgaaaaacatcttttcagaagagggatttgccgcgcggtttacgcagcaaaatgactttgtctggataatggaggcgattaaacggtaaatcgaagggattgtgtataaatgaaactggcagtcatcggagcaatggaagaggaagttacgattttaagaagcaaactgaaagacgcaaaacaagagatgatcgctcactgtgagtttacaactggcagctatgaaggcgtcgaagtcatcttgctgaaatcaggtatcgggaaagtcaacgcggcgatcagcacgacgcttctgcttgaccgtttcaaacctgattatgtgattaacacaggctcagcgggcggttttcatcatacattgaatgtaggcgacgtcgtcatctcaacagatgtccgccatcatgacgtagatgtgacggcgtttgactatgaatacggacaggtgccgggtcttccggcagcatacaaagctgatgaaaagctgatcagtattactgaggaagcggtttctgaactgaacggcattcaagtcgccaaaggcacaatcgctacgggagattcttttatgaatgatccgaagcgggttgaagacgtacgcgccaaatttgcggatttgtacgcggttgaaatggaagctgcggctgtcgcacaggtgtgccaccagttcaaaacgccttttgttgtcatcagagctttatctgatattgccggaaaagaatctgacgtttcatttgataaatttttagaacaggctgccgttcattcaactgagcttgtcctgaatgtcatcaaacgaattcactaagcgggggattctcgttctcctccgcttttcaaggaggaggacatatattgaacgtgataacagatattacagaactgatcggaaatacaccgctgctccgtctcaagcattttgatctaccggagggaacagcggtttatgctaagcttgagatgatgaatccgggcggaagcattaaagacaggctgggcgggatgctcattgaagatgcgcttcgcacgggaaaggtgaaaccgggcggcgttatcattgaggcgactgccggaaacaccgggatcggactcgctctgtgcgccagaaagcatcagcttcgcgccgttttttgcgtcccggagcatttcagcagagaaaagcagcaaattatgaaagctctcggagcggacatcgtgcatacgccgagagaagaaggcatgcagggagccatccgaaaagcgcttgaactggagagagagattaataattcttatgccgttctgcaatttaaaaaccgagtaaatccattgacttactacaaaacgattggacctgaaatatggaacgcgctcggcggggatatccacgcttttgtcgcaggagcgggttccggcggcacctttgccggtacggcagcttatttaaaggagaaaaatcctgccgtcaaaacggtgatcgttgaaccggaaggctcgatcctgaacggaggagagccgcatgcccataaaacggaaggcatcggcatggagtttatcccggattatatggacgagaaccattttgacgccatttacacggtggaggacgatacggcgttttcgcttgtcagagaagcggccgagaaagaaggcctcttaatcggaagctcttcaggggcggctctttatgcagcgcttgaagaagcgaaaaaagcgcccgccggatcaaatatcgtcaccattttccctgacggcagcgatcgatatataagcaaaaacatttttcaaggaggtcagtaagatgaagaaaaaaacgctgatggtgcacggaggaattacgggagatgaaaaaacaggagcggtttccgtaccgatttatcaagtaagcacgtaccggcagccgaaagcgggcgagcacacgggttatgaatattcaagaacggccaatccgacgcggacggcgcttgaaagcttaattgcagagcttgaaggcggcgcggcgggatatgcgttcggctcaggcatggctgcgattactgccgtcatgatgctgtttgacagcggcgatcatgttattttgacggatgatgtatacggcggcacttaccgggtgatgacaggcgtgctgaaccgcttcggcattgaagcggactttgtcgatacgagcagtgaagaaaaagtcaaaaaggccattcgcccgaatacgaaagccatttatatcgaaacaccgacaaacccgctattgaaagtgactgacctcaaactgatgtctgacatcgcaaaagaagcgggcgtattgcttatcgtcgataatacgttttacacgccgtatttccagcagccgctcagcttcggcgctgacatcgtgctgcacagcgcgacaaaatatctcggcggccacagcgatgtcgtcggcggcttagtcgtcacggctgataaagaactgggcgaaaagcttcattatgtgcaaaactcaacaggcggcgttttaggaccgcaggattcatggcttttgatgagaggcattaaaacactgggactcagaatggatgccatcaatcacagcgccggaaaaatcgccgggctgcttgaagcgcatgatgccgttcagacgctttactatccgggatcagcgaaacatccgggccatgagctgacaaaagcgcaaagctccggtttcggcggaatgatttcctttgatgtcggcagcagcgaacgcgtcgacgcgtttttagaaaaattgaacctgtttacgatcgcggaaagtttaggagcggttgaaagcttaatctccgtgccgtccagaatgacgcacgcttcgatcccgcgcgaccgccggcttgcgcttggcattaccgacgggctcgtgcggatctcagtcggtattgaggatactgaggatttaacggcggatgtgaaacaggcgcttgattcacttttataaagaatggatagatttacattctctgtcggctgtcagcttgtattataatgttggtagactataaaactggcaggtgaccttatatggagaagaaaagactgaaatcattaatagaagattttaagcattacgcatttattctgcttgcagtcagcaccttcatttatatcggcgcggttcttcccggacaagggctgactgcgggccagaaaatgctgatgtttgtaacggattgtgtatttttagcgggcgcttatttctgcgttgaccgttcacttatttataaaaagaggctggaagaggccgaagaataaaaaaaagccattgtctttgggactgccccccgtttttgagacaggggtcaaaacaccttttaaacagccaattgccgatagtttatcggtgattggttgtttagtttggtttgaatacgaatattgttataataatgaatgtattctatgacagtgcgttctacgatggcagtcgtagttcgatcaatgctgttaagatagaacgtttcagactttagcgaggaatgaaacgattcgatggaggcattatcagcgggcgtccctttgcgggacatgctcatggtaatgccttttgttttaacagctttttgatactcgtaagatgtatacacagaaccttggtcactatgtaacacgcagttctcaggcagcattggtagctgatcaagtgtgtctaagacaaaggctgtgtcctgcttatccccaatagtaaaagcaatcacttctccattgtataaatctaatatactggaaaggtacaattgtttctgtccataaggcaaatatgtgatgtccgttactagtttttcaagaggacgatcagactgaaagttccgatccaatatattatcgaccacggcatatggctgcccatccttcttgcgctttttcaccttaacccgacactgccattgatttttctgcataatacgttgaaccgttttatggttaatacacattctcttttttagtatggctgtgatttttcgatatccatatcgatacttgtgctctcggcacaacgtgccgatttgtttttccaaatggcgcttgggatgatccttcatcagattcttcttccaacgataataagacgctcgagagatacctaaatgaatacagatatcctgtacggtcattgtgctgtgcaatatttctacaagttcgactgacgtttcgctatcaacttcctttccaattcgttgtacttttttaaaacttcattctgttgtctcaggtaacgaatctctgcctgcagtttctctaaatcggaagaatactccggaccttttccgtaagtgtattgctttccaacaggctgttcgaatcgatgtgtatcaccagccttataccatctaacccatgtctgaacctgtgtcttattcttaatattcaactcctgcaggatctctttcataggtacgcctgccaatctcatttctacagccttctgtttcacttcaaccggataactcactcttgtccccatagaaaaaacacctccaagtctaatttcggataacaatcatccgtattcaaacttgaaggtgtttttatttgtctcatcttatggggtcagtccccttttgacaatggctttttcgtttcttattcagacggggtttcgcgtaattcttttcccattccttttaaaaactgcagcccgaagccgagcgcgcggttaatatcaggatcaccgagggctttcatcagttcaaacatactgactttcctgtcctcttttaaaaatctttgcgcctgatccgtcccggccatggcgctttctaaaagtctgcccataaattcgggatcagcttttgacagcgcgcctcccgcggccatcatcgtattcaggagattggtgacaggttcccgggaaatctgtccgagtgcgattttggcaatctcctcttttgcctggagcatatagccggcggcatcaaaaatgcccaagctattcagctctgccatgatggacatcgttttcgcgacggcttcttcattttctgcgagaagcgtcttcagctcttctagtttttcagctttcagctgttcctctgttttcgtttctttttgaatttcagtaattgggcttgccataatgtttcctcctttccttaatcagttaagtgcacatagcccggacggttccattttcgctgagcttccacaccgttttgcggatgacgttttttgttccgcggattcgttttcggaagcggcggagtatcacaggaaccaagcacttccatgcggacttttgtctgcttataggcaggtgtatgtgtccgtgaatcatacgcaggcccggtcaggaaattaatcgcagaatctttatctgtagagttcatcggcagataaagctcattcgcgcggacgcggtctgtcacaagcgcgttcaatttaaccgccccaaaaggagagacgagccggatcattgtcccgtcgcaaattccgcgttcagccgcgagctccggcgatacttcaacaaatacatccggaactttagactgaatgccttttgacttgtttgtcatgtttccttcgtggaaatgttcaagcatccgtccgttgttaatatgcaggtcatattcttcagggaatacagcaggctccacccaatcgctcagcgcaaaacgggcttttttgtccgggaagttaaagccgtcttcataaagaagcggagtgctttctcccgtaaagcttccccacaagaagctgttccagccgctaagaacgtcgtagcttgcttttccgaacagcggagaaaggctcgccatttctgagaaaatgtcgctaggatgcgtgtaattccaatcagcgcctaaacgattggcgacttcctgaataatccaccagtcgggttttgcatcgccgagtgtcggaagcgcctgatacaatctttgcacacgccgctctgtgtttgtaaatgttccgtctttttcaagagatggaaccgcaggcaggatgacatccgcgtattgcgccgttcttgaaaggaaaatatcctgcacaacaaagaaatcaaggctggataaaatgttatgaacatggttggcgtttgaatcgacgagcgccatatcttcaccgacgagatacatggctttcatgtttccttcttcaatcgcatggagcatttcgatattatcaagacccggcttgccgtcaatttcaacaccgtaagctttttcgaatttagcgcgtgccgcatcatcggtaatatgctgataccccggaagccagcctggaagagttcccatatcgcaagcgccttgaacgttgttatgtccccgcagcggataggctccggcgcccggacggcggtagtttcctgtggcaagcagcaggtttgaaatcgccgctgatgtatcagagccgcctgtattttgagtaacgcccatgccccaaagaacacaagtgccgtctgcatcacgaatcatttcggcaatgcggatgattgtatcctgagaaagtccggtgatgcgctccgcatattccaatgtgtatttttccagcgtttctttataatcatcaaagtagttgacattttcatcaataaacgcttgatcgtgccagccttggtcaatcatatatttcgttactgccatgagccagacctggtcagtcccttgttttgggctgataaagaggtcggaccgttcagccatttcatttctgcgcagatcggcaacaatcagtttttggccgtgcagtttatgggcgcgtttcacgcgtgtggccagaaccggatgtccttccgccggattggcgccgacgatgagcacgaggcccgcttttgcgatatctttaattgtgccagcgtctccgcccataccgacggtgcggaataagccgtccgttgccggtgactggcagtagcgtgagcagttatccacgttgttggtttcaaatacttggcgcgctaatttttggatgacgtagttgtcttcattcgtaattttagaagaagaaataaaaccgacagaaccatttccgtgttcggccttgatcgaaccgagtcttgaagcgacaagatcaagagcttcttcccatgacgattcaacaaatgcgccgtttttccggataagcggttttgtaattcgttcttccgaattcacgaagtcccagccgaatttccctttcacacaagtggaaatcgcgttaaccggagcatcggaaacaggctgaattttaaggatgtcacgtccttttgtccatacttcaaaagagcatccgacgccgcagaacgtgcagactgtttttgtttttttcgtccgtttatcgcgcatagccgcttccacttcagacacggcgaagatgcttgtatagtcgggttcaacatttttcactaaatcaatcatcggttccatgacatcttcttttattcctgtcataaatccggcttggccgatcattgatttttccatcagtgcgttacaaggacagacagtgacacactggccgcagctgacgcaggaagattcattaatggcgacgccttcatcccaaatgacccgcgggcggtcgcgctcccaatcaattgaaagggtctcattcacctgaaggttttgacacacttccacacattggccgcaggcgatgcattggttcggatcatagcggtaaaacgggtgagacatatcaaccgcgcactttgaatcatctttcggcgtatacggatatttctgatgctcaatccccatcatttccgctgtattatggagtgtgcaattgccgttgttgttatcgcataccgtacagtaaagcaggtgattctcgagcaggcggtccatggcctctgtctgagcctcttttacccttcccgacgtaagcgagatggacatcccgttttctgcagccgtggaacaagagcgcttcaatttcccgtttacttcaacaatacaggtgtcacatgtttgaatcggatccacttccggtacatggcaaatttgcggaatctcaattccgttttggtttaaaatatctaaaatcttagacccctctggtgcttcatactccgtgccgtcaattttgacacggatagactgaacgtctgtcacttccaattcccctccatcttttaaactcgaaaaaagccatgcacatagataccggcctcctgtccggagaacggtataaatacgcatggcggaatagttcactagcaagtcttactaacagaccaatcctatttgtataaaacgatagactcataacacgtttcctattacaaatccatcttcactgcttttattataaggtgatatttattataatacaatacgaaaggaaaactttaaccaagtgaaatgtcacaaaggggaaccgggaatgtctttcataggctaaaatcggaggggacaatatgtctaaaaaaattcatgaatttaacgatattatccggaaattgcgcaaagaattatttggaaaggggcctgaacgaattcacaccgtttttgtggataacatggcggtatctacactttacggcaatctaagcgcaagtgagcagtttatcgcacgcacgcctgaaggaagagaaatggttcatgcggcgcgaaccagcttaattcaggagctgtattcaaaacaaacgcctgacggaatggaagagctcatcggagcaaagcttgtgcatctgttttcagatattaaaatagaggaaaatattgctgtatcggtgtttgtctttgaccgctcaattgaagagcataaagaagaaatcaaaagctgacaatattcaattgacacgaaattgtcacatttgatatgatatgaactgccagcagtggcctaaggacgattttttatggaatgtgtgcatgatctgtacatattctataccgcatattttcattctgcttgatattgttgtatgggtatgcatacaagttaggcagcattcaaaccccgttttttcagacgggttagttgaatgctgccttttttgttaggcgtctttggaaactgcgggctgaaatgataaatggaggggttattatggcttttcgtaaaccggacgaaatagcggagcttgcggtcgaatcaggggtaaaaaaggtgcattcaccgctttcagcactgattgtattaggatttttgggaggagcgtttatcgcactcggttatttgcttgatatccgtgtcatcggcgaccttccgaaagaatggggaagcctgtcgagtttaatcggggcgtccgtgtttcccatcggattggtgctcgtcgttcttgccggcgcggagctgattacgggaaatatgatgtcggtatccatggcgctgttttccagaagaatatccgccggtgcattggtgaaaaattgggtgatcgtgacgttgatgaatcttgtcggcgcactgtttgtcgcttactttttcggacatgttgtcggattaaccgaaacaggaccttacttggaaaaaacaattgcggtcgcacaaggcaaattggatatgccgtttggaaaagtcattgtttcggcgatcggctgtaactggcttgtctgtttggccgtctggctttctttcggggcagaagacggagccggaaaaatcgcgggtatatggtttcctattatggcgtttgtcgcaattggttttcagcacgttgtagccaatatgtttatcatcccggctgcgatatttgcaggctctttttcgtggggtgatctgattggcaatctcattccggcctttatcggcaatgtcatcggcggggcagtgtttgtcggccttatttattttattgcatattcaaaaaaagatcagaaaaagcaagggatgaaaagagtttcctgaggtaagaaagatgccggaaaacacggacaattgaagcggaatgccagcacattttccgtccaaatcttgaaaaaaatgtttacaaaatggaagctgatggatatacttacaaagtaagaaaaaagcaaagggaggttgaatcacatgacgacgttaaacggcaatcaaaatctacaattgaaccgattcagcctgtggaagagttcgtgtccttccttaacctctgcctgtcaagtacgttaatttcggagtatcaggacattcgcagctccccgcagggaaagaagcacagtcttcttttgtctgcggatttagtctgcccgcagcgcatatgaactttgctgcgggttattttcgcttgtgcggatattgaaagggggtgagcgataatgaccattaatcttttctttgtaacactgaccatttcaaagcgttttaaaagtgcggaagagtatgaacgagaacagcaggtcgaagagttttataatgaagcgaaagaacgccagctgaaacacttttatatgaactaacggacacgaagggccaaaacggaggagaaggaggagattatcatgttcagaattgaactgctgaatcattacacaatggagaaggaccaggtttagcgaggatgttgctgtcacgtcgcagacggcctgcataccatggtaaagaaagaaaaattggtaagcgggtgatagcatgcaaggcggtcagaacagaattccatccatcgggcacgggtatgcgtcaatgccccattcatttaagcacggctacggcaacccgtatcgccggcagagaatggcggcgctttcccggcagacaagatatatagcaccgtattattggtactagagcaggcggaaaacctacgttttccgtctttttttttatgaaaacaaatataaatttcaaataaatcgaaacgttcatgaagagaagtgcgtctagttagtacctcatactaatacgaggtaatattatttctgaataataaatcacaggaatggaaaagcgggtgttatacaatgttgcaacatacatcttcagcattaaaacgaatgcgcgcgaaatactttgctgcatcagaaccggcagagtcagtcattcagcaaatcttgatggacatacaggaatacgaccgcattttggaaatcgggaccggaaacggctcaatgtttaaacaaatcatcggacagcttgaaaagggcagtcttaaaagcatagaaacatcgaaacgtaaaatacggaaaacacagcgcgcaaaccgttcggttataaaagccgggctcggaaacattcagcaggggaggccggaaagcataccgttccgcgaccgcagctttcataaagtcttctcattacatactgctgaaacagtcagcgattaccggacggcatgtaaagaagtgtaccgcgttcttcaaattgacgggtgtttctatatggttttgaaaccttcgcggatgagtgaaaaggatgtgattgaggtgctctatgatcagcatttcagagacatttcagttgtcagcagagattcattccattttattactgccattaaatagaatatttcttgggaaataaaaagagctgcttaagtcactgcagctctttttgtgaaattgggcatatttccttatttttggttatttcacatatattttatattaaaaaaagtttttttcttatacaatggtaatcagatgaccgtacattttaaatattttgaacaaacggaatgaatattcattccgcgtttagaaagggggatgaaatgacagcttcaaataaggttgaactcattatgaaagcgtcgcttactttgtttacagatagaggatttgacgccacgacgattccgatgattgccgctcaggccgatgtcggaaccggcacaatttaccgttactttgacagtaaagagacacttgtgaacgtactgtatcaggaaagtgcgcagcgttttatgaaaaaagtcaaaacggactttcaggggatatctgtaagagaagggtttcatcacctgttttattgtctgattgattttacgaaggaaagtgagtatgcattgttttttcttgaaacgaataaggacgcctactttctgaatgaaacgagccgtaagcttcttgatgaaataacacagatgcttgacgtcttttttcagcgcggcaagtctgaaggcgtgctccgcaatctgccgtccaatgtgctgatagcgctgctgctcggggcatatctcaaactctatcagcttgtccggacgggaagcgtcgaaataacaaaaccgtttctgaaagaattggaacaatgttcttgggatgccatcagaactcattaattattcgccgaaggaaggaagatcgatatgaaacagctaagcgctataccgcagccgaaaacatacggacctctgaaaaatctccctcacttggaaaaagaaaaactgtcacaatcgctctggaaaattgccgaagaatacggcccgatctttcgttttgaatttccgagctctgtcggggtcttcgtatcaggccgcgagctcgcggcagaagtctgtgatgaaaagcgatttgacaaaaatctcagcaaagccctgctgaaagtccgtgagtttggcggtgacggactatttacgagctggactcacgaaaagaattggcagaaagcgcatcggattttattgccgagcttcagccagaaggcgatgaaaggctatcattcaatgatgctggatattgccatgcagctcgtgcagaagtggagcagattaaatccgaatgaagaaattgatgttgccgaagatatgacgcgcctgacgctggatacaatcggcctgtgcggatttcattaccgctttaacagcttttaccgcgacacacagcatccttttatcacaagtatgcttcgtgcgctgcaggaggcaatgcgccaatcgcagagacacagcctgcaggacaagctgatgatcaaaacgagacatcagttccagcaggatattgaagagatgaattcgcttgtagaccggatcatcgctgagcggagggaaaatccggatgagaatctgtctgaccttttagcattgatgcttgaagcgaaagaccctgtaacaggggaaaggctggatgatgaaaatatccgttatcaaatcattacctttttgatcgctgggcatgaaaccacaagcgggctgctttcttttgcgatatactgcctgctgaaaaataaagataaattgaaaaaagccgttcaggaagccgagcgggtgctgacgggagagacccctgaatataagcagattcagcagctgacatatatccgcatggtgctaaatgagactttgcggctgtatccgactgccccggcattttctctgtacgcgaaggaagatacggttctcggcgggaaatatccgattgcgaagggacagccggtgacgattctgactccgcagctgcaccgggataaaagcgcgtggggagaagatgccgagttattccgtccggaaaggttcagtgatcccgcggcaattccggctgatgcgtataagccgttcggaaacggacagcgcgcatgcatcgggatgcagtttgccctgcaggaagcgacaatggtgctcggccttgtcctgaaacattttgaactgattgatcatactgattatgagcttacgattaaagaagctctaaccattaagcccggtgattttaaaatccgtgtgaaaaacaaggacgtgtccaatcatcagcccgtacaaaaccataaagctgaaggcagcggtcacaaagaagaaacgaaagaaatcccgtcccacggaacgccgcttctcattctttacggttcaaatttgggaactgcggaaggaatcgcggaagagctggctgatatcggaagaagcaaaggattttcaactgaaaccggcccgctcgatgattatgccgggaaactgcctgtaaaaggcgcggtcgttattgttacggcttcttataacggggcgccgcctgataatgcagcgggttttgtgaaatggatggaaacccttgaagatcaggaattaaagggtgtttcttacgccgtcttcggctgcggagaccgcaactgggccgccacttaccaaaggatcccccgcctgatagacaaagtgcttgaagaaaaaggggcaaaacggctgacctctatcggggagggcgacaatgccgatgattttgagtacagtcaggaagcctgggaagactcattctggaaggacatcatgaaggcttttcatatagaggccgctccaaaacagacaaacaaatcacagttatcaatcgaatacgtaagtgaagcagccgagacgccgattgccaaaacgtacaaagcatttgaggcggaggtcatcacgaacaaagagcttcataccgaaagcagcaagcgctcagtccggcatattgagctgcgtctccccgaaacagaaacgtatcaggaaggagatcatctcggggtgcttccgcaaaacagcggggaactgatcagccgtgtcattcgccgattcggtcttgatccgaaccagcactttaagatcaagggccggcagctgcctcatctgccgatggaccggccggttaatgcgccggagcttttggcgtcctatgtagagctgcaggagccggcaacgagagcccagcttcgcgaacttgccgcacataccgtgtgcccgccgcaccaaaaagaattggagcatctttattctgatgatgcggcatataaagaaaacgtgctgaaaaaacgaatgaccatgctggacctgctggaagattatcctgcatgtgaactgccgtttgagcgctttttagaacttctgccgtccttaaaggcgcgctattattcaatctcaagctcaccgaaggcaaccagcggggagctcagtatcacggtcggcgttgtgacggctccggcatggagcggccgtggggaataccggggcgtggcttcgaactatttagccggattacaaaaaggcgattctgccgtctgtttcatccgctcgccgcagtcgggtttcgcattgcctgaaaatccgaaaacgcctctcattatggtcggagcaggcacaggaattgcgccgttcaggggatttatccaggcgcgggctgccgaaaaaatgtccggtaacagcctgggtgaagctcatttatacttcggctgccggcatcctgaagaagacgatctgtacaaagatgaattcgaccatgcggagaaaaacggccttgtcaccgtgcatcgggcgtattccaggttagatcaggactgtaaagtatatgtacaggatgttctgcttcgcgaggctgcacaaattattgcccttcttgaccaaggcggccatctctatatatgcggtgacggaagcaaaatggctccggctgtcgaaaatgtactgcttcaggcgtatgaaaaggtgcataacaccgattcaaaagtttccttggagtggcttgaacagctgcaggcggaaggaagatatgcgaaagatgtttgggcaggtatgtaacagaagagtgagacaactgaagaatgttttttaattgaagaaagccggcacgatatttgaaatctactgaatcaaaaggaatagttatagggagtatcgtgccggccttatctttagtatcggacaaaaggcacaaatctttaatgtttttattgatttacatgcaggcggctatgtcccttttttctgaattccgccagaaataaaaccggataagacagcaatagcaaaaccgaaataaatgaaatgataccgatccaatgaaaatgcgtccaaaagaaaccgccgcaagacccggccacgcttgaaccgatatagtatgcaagcagatataatgaagaggcttgcgcgcgctgatcaccggctgcgcggccgacccaggcgcttgcgatcgaatgagcgccgaaaaagccgaaggtaaagacggcaatccccgcgattttgagcgcaagctggggcaaaagtgtcaccgctgcgccggcaagcataacaaaaatcgcaatcttaatcatttttccgcttccgaaaagatctgcttttttccccatatagaccgagctgaacgttcccgcgagatagacaataaaaataaaaccgatcacagtctgcgacaaatgataaggagccgccattaaatgaaagccgatataattatataatgtcacaaaactccccattaatataaatcccagagatattaacaaaagcagccgtttgcggtgcaggaccgctccgtattccttacatgccgcttttacgcccgcatgccgctgagatgaatggcgcggagccggaagaaaacgccaaaacaaatagcttaatacaatagaaagaatgccgatgatggcaagcgccggccgccagccgaatacatcggtcagaagccccgttaacagcctgccgctcattcccccgatgcttgtgccgctgatatacaagcccatcattttcccgaggcccttcggatcaaactcctcgcctacatatgtcatagcgacagccggaactcctgccaggaaaataccgagcagcgccctcatcgccaaaagcgccggaaaggccggactgaacgctgttaatagacctaaaacagaagtagctgttaacgacagcaccattaatttttttctgccgaatccgtcagacaacgaagcggcggccaataatgaaaatgccaaaacggctgttgagatggataaagttaagctggcagccgcagcggaaatatgaaactcttccgaaaacaaaggcataagcggctgtgtcgtgtaaagcgtggcgaaggtcacaaagccgctgataaacagagccaagctggcctttctgtaagcctttgtgtgaggctgaataaacgtcatgaatgtccctcttttctcactgttggttatatatgtatcgtacgcttttcatttcaatgtgtctaatttataataactatagaattaatgcgtgtaggttatgaagaaaggggagaaggagaaaatggagcttcatcaaattgacaacttcattgcggcggcagctcatcagcatttcacaaatgcggcaaaagaaagaatgatttctcagccggcattaagccgatcgattatcaggctcgaagaagaattaggcgcgccgttattttacagagagacaaaagccgtccggctgacaaggcacggagagcagttcttaataaaagcaaaacaagcgagacgagctttaaatgaaggcgttgaacaagtgaaaaagaatatgagcctggagcacggcgaaatatctgtatcttttcttcatacgctcgggctgcgcttaatgcctcagctgattgccgaatttaaaaagctatacccaaacgtgaccttccggctttatcaaggcgcaaatgaaacgcttcgcaaaatggtggaaacgggagatgcggatatctgtctcagctctccgccgcttcccagcgagcttttacaatggacagtgctggagaaagagcctctttatgcggtgctacctgagaaccacccgcttgcaggaaataaaagcattcaaatgaaagagatgcaggacgaggattttgtgggttttaaaccgggatacgggctgaggtatatgtttgatctgatgtgccgggatttgaatatacacccgcatctcgcatttgaaggagaggaagtgtcaaccatattaggactgaccgccgcgggtctgggggctgcagtgctgccgaaaaccgcggagcattcatactttccggtcgtttttcttccggttgcagattaccaatgcgaacgcaccatagcgttagcccagctgaaaaaccatgctctctctcccgctgctgagcgttttaaacagtttgcacttgagtattacaaagcacgcaactgagcggtcattttattaaaatcaaagttgaaaataaagcagaaagaaatacagaaaacggaggaaaaccatggcgaaaaaaacagtgaaaacaaatgctgtccgtatcattgagcagcaaaacattccctatgagctattaggttacaaaacagaagggggacagcccgcagacggtctttccgtttcacaaaaaatcggatacgctgccgaatatgtttataaaaccttagtggcatctgcaggaactgatcattattacgtctttgtcgttcccgttgcaaaagaactgaatctgaaaaaggctgcgaaggcggcaggtgagaagaaaatagaaatgattgccatgaaggaccttttgggagtgaccggctatatacgcggcggctgctctccgatcggaatgaaaaaaaggtttccgacttttattgatagatccgctgaaacactggagtttatgattgtcagtgcggggaaaatcggaatgcagctgaaagcagcgcctcgagatttagccgaagcaagcggggcggtatttacagacattgtataaatgtccggtgaatctaatggaatacacgtttcaagggagaatgataatgaaaaaaagatatgaaaacttgaatggcgtgaagaatgaacatggattcagggacatgtggaaatggatgaaagaacgaagagaaaaaagtaaagacttaagcgagaacattccgaaagcggtcacaagggatgtccgtgatgttgccgtcaatcggacggaaaccgccataacatggatcggccattcttcatttctgatccaaatacaggggtttaacataatgaccgaccctgtatgggcgcggaggatgggttttcaaaaacggctgacagagccgggatatgaattgagcgaactgcctgacattgatgccgtgctcatctcacatgggcattatgaccatcttgattttccgagtataaaaaaactgagaggaaacccggatttttacgtgcctgcgggactgaaaaagctgttcaacaaaaaagaccgcaaaaaggtccatgaaatgaattggtgggatcgttttgagatgcggggggtgaacatatcatttgttccggcccagcactggacacggagaacgctttgggataccgatacctctcattggggaggctgggtcatagaaagcaaaaacggcgagtccatctattttgcaggagatacaggctattttgaaggctttaaagaaatcggagagaggtttcgtattaaggcggctctgatgccgatcggagcatacgaaccggaatggtttatgcaagtgtcacatatcaatccggaagacgccgtgaaagcgtttttggagctgaaggctgacagcttcattcccatgcattacggggcattccggcttgctgatgatacaggcccggaagcactaagcagactgcacggcgagtgggatcggcttgcattacctcctgaaaacctgaaagcattagcgcttggcgaaacattttggctgtaacagcaggttttcgctgccgacaccaatcgtttaaaaacggttggtgttttgttgtcaaccaaaggtgaacagctttagtataaaacatgatttttccggaatctgcggtaaaaaacaaaactttttactcttttgtttcattataaaatgaaaacggtttcgtatgtgtagtatatttaacctatcacaattgctccagcagaaacggacaggaaggatagaaaaacagatgaaatacatgaattcaaggcagaaaaagattttgtatctgttgttatctgaacctgatgactacttagttgtgcaagatttcgcagacagggtccgctgttctgaaaaaacgatcaggaatgatttgaaaacgattgaagatttcctgaatgaacatgctcaagctcagctgatccgcaaaccgggattaggcgtctatttacatatatctgaacaggaaaggtcacggttaatccggcaaatttataatgagcactttacgtgcaggcacaagaccgatgaagaaagaatacttcacatcgcttatgatttattaatgaattcaaagcccgtttccgcaaaagaaattgccgcacagcattttgtaaacagagcttccattaaaaaggatgtaagtgcggttgaagagtggctgaagcgatttgatctcacgctggtttctaaacagcggctcggcttaaagattgaaggggacgaaaaaaacaaaagaaaagcattggcgcgaatttcagatttgattgataatgcggaatttacaagccaatttataaaaagtaagtttttaagttatgaagcggactttgtgagaaaagaaatcaagttattacaaaaaaaacattctatctattttacggatgaaacatttgaaagtttgctgctgcatacattgctgactatccgccgtatcaaaatgaaacagccggtcgccatttctgcaagacagctggacgcggtaaaaaagaagaaagaatatgaatggacactggcttgtttaaaacggcttgagccggtatttgccatccggtttcctgaggaagaagccgtctatttaactttacatataataggcgggaaagtccgctatccatcgcagcaagaaaagaagcttgatcttgaagattctgagctttccaaagtcgtcaggcatttgatcaatcgtgtttcagaactgcaaatgctggatttttataaagaccaggaactgatcaacggattgaacattcatctcgatccggtgttgaagcggctgagctatgatctctctgtttcaaaccccatgcttcacgacatcaagaaaatgtacccttatttgtttcatcttatcatagacgttttagaagacatcaatcaaacatttgatctttatattcctgaagaagaggcggcctatttgacgctgcattttcaggcagcgatcgaacggctgcgccgaaacagtcataaccctaaaaggacgatcatcgtctgccatatgggcattggcatgtcgcaattgctgcggactaaaattgaacgcaaatttcatcacattacggtaaaagactgtatcgcaaaagcggagctgacagagtatatcaaaaagcataaagatatagatttcgtcatttctacgatagggcttggaaatgtaacgatccctcatattgtcgtatcaccgcttttggagtctgctgatgaaaagaagctcagcgcatttctgcaacagcttgatacatcacaccgccgggagcaaaaaacgtttaaaatgctgaacgatacgactccgtttctcgtttttttacagcaagagacagagcaccgttatcaggtcattgaaaagctggcgcaggctttgtatgaaaaaggctatgtagaaaaagagtatggcattcatgcagtaatgagagaaaaaatgtcggcgacaaatatcggggcgggtattgccatccctcacgcgaactctaaatatatcaaacaatcagccattgcaatcgccaccttaaaagagccgattgaatgggggacagaaaaggtgtcgctcgtttttatgcttgccgttaaacacgaagatcaaaacaaggtaaagcaattattcagtgagctttcctatcttagcgagcagccggtatttattcaaaaactgacggaagaaaaaaatgtgatgacgtttttatcgtatttaaactattaaaagcagggaatatctccctgctttttttctgtttatagggaaaaatgccgttatttccggaacttatggtaaaaaaacgcgcttatcacaggctgatttcagtataaagttgagacaagatcttgaaattcagactgcaaaggaggatttatatgaaactgttagcgattacatcatgtccgaacggcattgcccatacgtatatggctgctgaaaatttacaaaaagcagccggcagattaggcgttgagatcaaagtggaaacccaaggcggaatcggggtggaaaataggctgaccgaagaggaaatccgggaagcagacgcaatcattatcgcggcggaccgctcggtgaacaaagaccgattcgcgggaaaaaagctgctggccgtcggggttcaggaaggcatccgcaaaccggaagaattaattcaaaaagcgcttagcggtgaagtgccggtctatcaatctgcttcaaaagctgaatccgcaagtcagcagggcaaaaaacaaaacccgatttaccgtcatttaatgaacggcgtttcttttatggttcctttcattgtcgtcggcggattattgatagcggttgcattgacgcttggaggagaaaaaacaccaaaggggttagtcattccggacgagtctttttggaaaacgattgaacagatcggcagtgcttctttttcattcatgatcccgattttagccgggtacatcgcgttcagcatcgctgataagccgggtcttgtccccggaatgatcggcggatatattgcggcatccggcagcttttacgacagtgcaagcggcgcaggatttcttggaggaatcattgcgggatttttggcgggatatgcggcgcttggaatcaaaaaatgtaaagttcctaaagcaatacagccgattatgccgatcattattattccggtgtttgcctcactgatcgtcggtttggcgtttgtctttctgatcggcgcccccgtcgctcatattttcgcatcattaacggtttggcttgcgggaatgaaaggttcgagctcaattcttctggcattgattttaggagcgatgatctcctttgatatgggaggacccgtaaacaaggtggcctttcttttcggatcggcaatgatcggagaaggaaattatgaaatcatgggcccgattgccgtttccatttgtataccgccgatagggcttgggattgcaacgtttttaggaaaaagaaaattcgccgccgcagaaagagaaatgggaaaagcatcatttacgatgggccttttcggtatcacggaaggagccattccatttgcggcccaagacccccttcgtgtgatcccgagtattatggcgggttctatgaccggatcggtgatagcgatgatcggccatgtgggggacagagtggcacacggcggccccatcgttgctgtacttggagcagtagatcatgtactgatgttttttatcgctgtaacagcaggctctcttgtcaccgctctgttggttaatgtactgaagaaagatatggcgaaatcccccgcgcccggcgaggtgctgcagtctgccgcaccaaatgaagctgcagcggcaaaagaaacaaaggaaccatctcaggctgacagccgaaaagccgggatgaccgaaatcaaaaaactgactgacattatcagtacggacttgattgaaccgcatttatccggcgaaacgagggatgacattgtcgacgaaatgatcgagaaaatgtcccgtaaaggtatgctgctgtctgacagcggatttaagcaggccattttgagccgggaacagcagggaaccacggcgataggtatgaatatcgccattccgcacggaaagtctgaagccgtcaaaacgccgggtgtcgcattcggaataagacgctcgggtgttgactggaacagccttgatggttctgatgcaaaactgatttttatgattgccgtaccgaaggaaagcggcggaaatcagcatctgaaaatattgcagatgttatcccgaaaactgatggatgacagctatcgggaaaggctgctctccgttcagacaaaagaagaggcgtatgagcttctggaagaaatcgaataaagcgggggatgatcatgtctactgaaccgatatttttcaatccggttttcaaagaaagaatttggggaggcgccgccctgcgtgattttcactataatattccgtccgagcggacaggggagtgctgggccttcgccgctcatcaaaatggacagagcacagttcaaaacggcatgtataaaggatgtacgctcggtgaattgtgggagcatcacagagatttattcggaaaccttgaaggagaccgttttcctcttcttacaaaaattttggacgcggaccaagacctgtccgttcaggtgcatccgaatgatgactttgccaaaatgcatgaaaacggggaacttggaaaaaccgaatgctggtatatcattgattgtgcaaaagatgcggagatcattttcggccacaacgcaacaacaaaagaagaactgatatccatgattgagcgcggagaatggggcgggctcctgaacagagttaaggtaaagccgggagatttcttctttgtcccaagcggcaccgttcacgcgattggaaagggcacacttattttagagacgcagcaaaattcagatacgacttacagattgtatgattacggaagaaaagatgcggacggcaggctgcgcgagctccatttggaaaaaagtatagaagtgatagaagttccctctgtccgtgaacggccgaccgttcaatataaacaaacagatgatctgctggcagctgttttaatagaatgtccttatttttcagtcgaaaagtgggttgtaaaaggtgaagcaaatctattccagcatcatcccttccttcttgtcagcgtgatcgaaggagacggaataatgagtgcaggcggacatgaatatccctttagaaaaggagatcatattctcctgccttccggtttgggagaatataaactggcaggccatgcaaattgtattgtgtctcatctgtgatcctcaaaacccttctctagcatcagagaagggttttttattatttttacaaaaaggacggaatttccagtgtatcagtgttttcgttcctgaatttattctctcaatttgtatatctcccgagccattgattcaagtatgtacatagcggggatttgggtggtgacattcgcattttcaacccattcttccgtcacgtaatatgaaatattcacatcggacattttggcaatggttgaatgtttatgatttgtaatactgatgacctggctgccttcttgtttcagctgattcagatgagtcaccgtagaatctccttcacctgaaaccgataatgcgattgtgatgctgttatgacggaaatgggaatgggccggaaagtaaggatctttaatatacatgaaagtttccctaagcacgaaaaatatctggccccgtattcggcgagaattcctgaacttcccactccgataaaaatgacgctttctgcatcggccgcaagggctgctgcttccttcagcttttcttccatctctccgcttactgttctttcaaaaaactcggcaacggaatgatggggactctttaaaatcgtttttttatttgcctccgtatacattttcagcttcaccttaaactccgaaaacccttcacagtttatttttttgcagaaacgtaaaatagaagccgtagatacatgggtttcatttgccaattcacggattcgcatatagacgactttctcgctattttgggagatgtagttgtataaagaagtttcaagctcgttaaatgaagcaatcatttcgtgtgtgaacatgcagggggattctcctttttatgagaatggtgaatgtacatctaatcgtaacatatcatttttaaaagaaacatagtgttatatttatgtgacaaatcactttttgtgtcattcaaaacaagacgtcagccaatgatttacggcgcaaaacaactgcggatataattcgttcatacgctttatgcttgatctcttcaagggtctctgacaaaagcggccgaaaaaaggaggacaatatgagtatcaaactgatagcggttgatatggacggaacgtttttgaatgatgaaatggcatataataaagagcgttttatgaatcagtatcgtgaattaaaatcgcgggggattaaatttgccgtagcaagcggaaaccaatatgcgcagcttacatccttctttccggaaatcaaaagtgaaatcgctttcgttgctgagaatggcgctttcgtcgtgaatgccggagaagaattattcgcgggtagcatgtctgaaaacactataaaagcagtgatccttgctttagagcagtatgaggtgaaaaacgtcattgtctgcggaaaaaaaagcgcgtatattcatgaaaaggccggtgaagatgaatatctgcatgccagtaagtattattatgtgttaaaaagggtgccgcattttgaaaacatcgatgatgacattttaaaattttccatcagctttcccgccgaacattgttccgcacttctgagccatttgaaaaacgccatcgggtctttcgtcacgcctgtatcaagcgggcacggtgacatagatctgatcataccggggcttcataaagcaagcgggattaagcttctccagaaacaatgggggatgggtgatgaagagtgtgcggccttcggagacagcggcaatgatctggagatggtgtccgccgtgaaatacggggtcgccatggataatgcgcaggcaagcattaaacaggctgcggcgcatatcacgcaatcaaacaatgaagaaggggtcttaaatgcgattgattccatcctcaaatgtgaaaaaccctttgtctgaaaaagacattttaactgcggaggtgctgaacgatgattaaattagtgattacggatttagacggcacatttttaaataatcaaggcgattttgacagaacgttatttgaaaagacaaaacgagtaatggaggaacagcatgtcgctttcgccatctgcaccgggaaacagtgtgaaagggtggaagccttattcggagaagacgcgaaagatttttggattttaggagacagtgccgcacgtatgaaaaagagcggcaagttcgtatatgaatctttgatcagcaataaagccggactgtcaattataggcgctttagaaaaaatcagctgcgggcacaccattatcgcgtgcacaaaaaaaggcgcgatcgtaaaagaaaatctgtctgaaagtgaaatgaaatatgtaaatgcctcttatgcacatgtaacgaaaataactgattttactgagataaaagacgattttatcaagattacggttcatgaccccgacgccaactgtccggaaacgagagaaaagctgcatgaattttttcaccaattatatatcgtagcatcagaggatacctggatggacatatcaaatatcggaatacataaaggatcaacagtacaagaactgcagcgattattaggggtttcggctgatgaaacaatggcgttcggagacggccgcaatgacaaagaattgatggaagcggcatcctacagctttgcggttaagaatgccattgacgaaataaaagatgcggcgcactttgtcatcaaatcaaatgaggaaagcagcgtcatgcacacgattatgagaatattagcgctgcaaaaacaatgatgggctaaaatcaatgcggcatgacttactagggatagaaaaagcgggctatcctcagactttaattcactcctgattttcctaaagtatgttaaaaatgaataaatatctatatttgactcgatggtattggtataatatgtataaaatgaatgaagcggtgtaatatcaagatgaaaaaaatcacttcatatcagacaaaaagtaggaactgcctcgttttgaaattgggaggtgtttgtattagcccgctgttgagccccgcgtatatcattcttatttttcttccggcagcttcttttctgttagggattttaggatatttcatctttaaaaaagtatggatgatggttgttattgtcttcattttgtccttgatattcatgtttattgtaataggtgccgaaccgacatttttcatttgggtggctatgatgacggggagctgttttgtctccggttcaatcactaagacgatatggacttttgcaaagagaaaatattagacagaagaatcctgtttgaacagctatcctttttttgtcgattgaagaaaaagaagtatagaggtatccgttatgttcttatattttgtctgttgttgtcagttcgggctttctgttaaaaatgtctgtctatcgttttgttcttttttaactaaacggagcactataattgaactgcagatacatagaaaaacaaaaaaggataaggaggatttttatgtttcaaactttagaccattttttgaaatcttgggaattcgaagccgatgcgacacaaaaactgctgaatcatctgactgatgaatcacttaaacaagaaatcacttcagaacattggactttaggccgtattgcttggcatactgtcgctgccattcacatcattacctcaaacacagatttaacgtttcacgctccggccgaagattatcctgttcctgcatcggcgcggtttattgctgagagttatcatcaagccagtaatgcatttgtacaggcgttaaaaacgcaatggactgacgatacacttcaagaatgtgtcaactttattggtcagcaattgccaaatggttcacttttgatgtttttaattcaacatcaaaaccatcatcgaggacaaatgactgtccttatgagacaagcaggtttacctgttccgggtatttacggtccggcaaaagaggaatggattaaattcggtttggaagctccgaaataggatattgttgtaagggctcgaaagaatagatgataccaatcgatgttggtatcttttttgttttagtcttagagtgattaaaccggtatccatgacatgcagacgaatcaacagttcaatagatgtaaattaaggtcaataaatgcagaaaggtgattatgatgataactaaaatgacgcgattcaatatgaaagacttcaataaaccaaacgaacctttcgtagtttcagggagaatcatcccttcatttgaggacaatgtttggacatatacagaggagaaatttgctgagccttatgtcaaaaaatatgacgatgaagacattgatgtcagttatattgaagaagaggataaagttgtctttttttattacgcagagaacgactgtgtcggccggagtaagcttcgttctaattggaatggatacgcactgattgaagacattgccgttgcaaaagattatagaaaaaatggtgtcgggacggctttattgcataaagtgattgagtgggcaaaggagaatcatttatgcggtcttatgcttgaaacacaagatattaatgtttcagcttgtcatttttatgccaaaaataactttgtcataggagcggtcgatacaatgctttattccaatttttcaacagcaaatgaaattgcggttttttggtactgtaaattttaaatataacagtatttgatgtttcgtcatttgcgggtgtgtgtcgcaaagcattcaaaacatcggcttgaggatttataataaggtatatcaatcaatgcagggggagttatgtatgaagtgcaaaaaaatgaacagggtccaattaaaagagggaagcgtatcaatggccctataaactgcgtctgccctcattaatggagggaaatttgtgaatacgccttattcacagtcagctttacggcacaaccaagtgttcatttggctttgtgttctgtcatttttcagcgcattaaatgaaatggttttgaacgtatcattacctgatatcgccaacgattttcataaactgccagcgagtgcaaactgggtgaacacggcctttatgttaaccttttccatcggaactgctctgtatggaaagttatcagatcagctggggatcaaaaagctgctcctatttggaattatggtaaatggcttcgggtcgatcatcggatttgtcggacactctgtctttcctgtactcattctggcccgatttattcaaggggctggtgcagccgcattcccggctcttgtgatggttgcagtagtacgctatattccgaaagaaaacaggggtaaagcatttggtctgatcgggtcgctggtggcaatgggggaaggtgccggaccagctattggcggaatgatcgctcattatattcactggtcatatttgctgcttattccgacagcaacagttatcaccgttccattcctgatgaaactgctggaaaaggaagaaagaatcagcgggcgctttgatatggcggggattatattaatgtctgcaggcatcgtattttttctgctgtttacaacgtcatatagaatgtcttttctgatcatcagtattctagctttcctgatatttgtgaaacatattaggaaaactcaagatccctttgttgaccctgcgctggggaaaaatgccttgtttatgatgggcgccctttgcggaggcctgatattcggcactgcagcaggatttgtgtctatggttccttatatgatgaaagatgttcaccatttaagtactgcggcaattggaagcgggattatgtttcccgggacgatgagcgtcatcatcttcggttacattggaggatggcttgttgatcggaaaggttctttatatgtgctgaccattgggattgtattaatgtcttccagctttttaatcgatgcctttttcatagatgcggcaccttggctcatgaccgttatcatcgtttttgtttttggggggctctccttcacaaaaacggttatatctacaattgtgtctggcagtttgaaacaaaaggaagccggcgccggaatgagtctgcttaattttacgagctttttatcagagggaacaggcattgcaattgcaggcggtttattatcgatccgcttgctggatcaaaggctgctgcctgttaatgctgatcattccgcttatttgtacagtaatatgctcattctttttgcaggaatcgttgttatgagctggctggtaaccatgaatgtctataaacgttcgcaaagaaatgactaaaaagggaaaaggatcaaacttgataaaagttttgatccttttttgaggagattccttattccggaagcttttgtcgatcaatgaaaggggagttcactgccaatcgggacttttgagaaagtgtttgaggatattaaaataggccggagagaaagttaatcattctgtttgaaaatgaccatgaagttcgtaagcagtatggttttaacacgcatctggattcccctgacaaagtaaaggtttttggggatttatgttaaaataatagtaagaaccttgtgcagcggacagggagtttcgttgcttcataaggagagggatctatgaaaaataagattcacatactgggagcctccggagtcggaacttcaacattgggagttgcattatcaaagcatttgcctcatacgcatcttgatactgatgattactattggacagataaattcactaaaaaaagagaaatttctgaaaggagagagttgcttgaaaaagacttgacaataaatgagaaatggattctttctggcgcagtgtgcggctggggcgatgatctaaaaagttattttgaccttgtcatcttcttatggattccgcaggatatacggcttgagaggttaaggcatagggaatttcagcgttatggaaacgaagtgttagccggcggcagtaaatatgaacaatcaaaaacatttttagagtgggcttctttatatgataatgccggaatggaagttagaagcaaagctttacacgaatattggatggcagatttatcttgtccattgctaaaaattgaaggagattactcagtaaatgaaagagttgatcgtgtcttggattatctgaattttaattaaactaacggatggagataactgcaaaatccaaaattcaaagacagttccggccattttaacggagctgtttttttataccgctttctgtttctctgttgtgaagtgatttattttcggcagcatcctacaatagagaagtgatttgttcttcgtgaggaagtttttggttaagttgcaagaaacggaactccaatgaatagatacaccctgaaacctgtccagccagcgtttaagctggttaccattgagtgaaaagcaattgccgccggcaaagacaatacctggaatgaaaagtattgcagggaaagctaatttggtcatttaccgtgaaaatacggaaggcttttacgctggccgaaatatgtatggcaggtaaccctggaagtggctgtattgactggagttttcactaaaaaggcgattacacgtattgcgcatgcagcctttcaaagtgcgatggaacgccgtaagaaggttacatggctcgggactctttttgaatacgtgccgagaaatgccggaacaataccctgaagtggatgattatcatattgatgcaatgacggtacatttagttcgtcggcagcttggggcttgcactgtcaattaatacaaatgggaaagcaggcaatggcctaggctgctcacggttcggcacctgacattgcagggaaaatattgcgaatcctatcggtattatactttcaactgctatgttgtttgaatgctcagtacacagtatcgtgataaaaaactgaaagaagcagcggaattaatagaaaactcacttcgggaaaccgtgaaggcaggaatcaaaatgggagatcttagcggtcaatcatcaacgtcagactttgcagaagcaattgcagaaaggatcggatgttaaggcggaaaataagaggtgagaagcagatcatcaaaacgcaataggacacctcaatttagattttcagtaagaacggctctgctcattaaaaaactcaattcgtagattaatggcatcaataatgctgcagatcgggttagtaacttaaagaggaagggatgagaccccttccttaacaccttcaattcctctaatttcattgtaagatatattacttttttgaaatgggtatccaaatttcacttttaaaagatggcgatgttacatctttatgctcattccacaggatttctgggccttcaatttgttcataatgtgacgatggaaaccattcagaataaatccgcccccatacttcctgcagtgcatccggaaatgatccggctgcttcgaatacagcccacgttgaggcagggacttcaagctgtgataggtgatttgggcaatgtttcgttgtggctgcgccaatatagtgatcaagctcaccgttttcctctgtccggccttcagaaaagttcgtggatgcactgatgagtcctacaggcgctacattagaaagctcttttagttgtttgattgctgtttcatctaaactttcccacatcgatgcaatgtcaggattcacgcctttgaataaaatagggactctttttttaatgccgacgatgcgaaatgcctttttttcttcaatgcgatagttcatttcatttcctcctttgattgataactggaaggtcattcgcggataagctttaagtgaatggccattatgtttagctgctgatgggcttatgccatgcagattttgaaatgctcgtgcaaaagaatctggtgagtgataaccgtattttattgcaagatcaatcacctttacgctgctgtctttaagttcaaaagctgcaagagtaagacgtcgtcgacgaatatattccgataatgaaatacctgtaaggaaggaaaacatccttttaaaatgatattcagagcagaaagcaagccttgctgcttctttgaaatcaatatcgttcgtgaggttttcttcaatatacgttaatgcgctattcatccttttaagcgaatccatttatttgacctcctttaacaaaagaataacaggagcgaaatgtatctgcccgacatttcgtgcacagttttgcaggataacttatatgtaataaattaagtgattcacctgtatttgtacagataaagaaaaccacctaataactgcttgggtttcataagatgaaagaagttatcattgttttatattgaaaagaaaacagaaaaagacggagttttcttgttggaggggtttactatcaatcaattgaaagttgcttacgcagaggtagataaaatgtcgagaacggtgttcaccttcactgcttgttcaattagaggaagtgattcttccttaagggagatcactttttcttattcgacgaaagcagcagtttagcggaagatggagaaaaatcagttgacttacttgaatactaaataggtgtaaaaagtggttattcatacggattgaaaaagaagaacacgcagcagattcacttgctcttgtttggggcaagtgttgacaaccccattactggtttaattaaaagaaggggtataaaacctgtatcaatggtgttactcgatatctgcgacacaggttttatatgcaggtaactaatattcctatatatgtaacattgcattttttattatgcaatagttcactctatttctgctttcaatttttcgaaccactctaaattaaccaagtgatgtgaacgggaattttcattcatgcggcgaaagtaattgattgtgccgggaatttcttgagtgatggacaggtattcgtcaaggagctcgattcgagttttagtctgatcgatttgtgattggatcagatccagtaatttatttttgtcgaattcatcggcaaagagtaacgccccataaaattgcaggttcacatattccgatttagtgccgtatttgatcattaatttctcgaattctgcccttcccgattctgtgacgttaaagttacggatttcacgcccgctggttgagggtttctgctgaatctgttcaatcaaacacttttcttcaagttgctgcagattgtaataaaatgaacctttcgtgaagttaacgatgtacttgtaatgacgtttttccattaaggccagaagttcatagccgtgagctccggggttttggatgagcaagccaaggataagtaagggaatcatggtttcatcaccttcgccatccgcgcctcaaattccgcgtacgtgattttacccgaagccaaatccatactatgaaggtaaatctgttctgttttagaatagtcaccattcactttcagtgattgctcctctcccgaaatgggtttcaggatatggtgctttttcgaaaaagcctcgaaatagcgataaccgaatttgcgttgtgaagctgcgtctaaatgaatgccatcaggattcgcagtcaaacctgccgcagtaacaaaataacaattctgttgttcattagcaaaacgcagcaattgttcattaacctgtcgaaattcagtcgcgtgctgtccaaaaccagtcttcccaagaaagtcaccaagccctccaataatcaacggtagctcatctaattccaactcgtttcttagcgtctcgatgataagagttaatttctcgtaataagtttcatgcagcgaacgataactgtcactctcaccttgatgccaaaggattccacaaatttgactggatcggagggcgaagcgggcttcggacaaagcatgctgaaaaaggatgccttccggatgccagtcattcaatgaactgccgccttccgcacacgggatcaagccaatttcttcatcgggatgagctttcgaccatgcatctgcaaaagatgcggccaggccaacgcctgaaaccggacggtcgtaattaatcggctctgtcatcatctgccactgtccattgcgcagcattttaattttttcattatagatagggtctacttcattcaaaaatccacggcccgccatattcgactgccccaacattaaaaaagactttatcatctaatttttcacttctttacatcaatattttagtctaattagactatagtccattcagcttgtcttgtaaagtttcaactaggttttatttttattattagtatgtatgaaaaacaaactaacattgaaaatttggtggatgtatttgagaattagcaagttcttttgctttaggtcttgataaacaatgaaaaaacaacaaaaaccctgtcatgtaagggttcctatgaggttcaaaatcatttttcataggaaatacattcaatgatgggggtgtagcccaaatgaaatggattgttaaaaagagagggctatgttgaaggggttaaatatcaataaaaaattattaaaaaggttaacgattgtaccaattctattcatttgttatgttttatttttaaatcctgaagttatacttgaagagcaatgtcctaaaatgcagaaaaagccgggatgtcagatccggcttttcgctcactttcccttcttcttccgcttctccttctccgcccgataaaactcatgaaacatcttcatcaatgcgcgtttttcaatccgcgacacataactccttgaaatgccgagctcctttgcgatctcgcgctgcgttttttctttttttaaatcaagcccgaagcggccgacgatgacttctttttcgcggtcgtctaaaatatcgatatattttttgaccttttcaagttccatgttgagctgaatggtgtcgatcacatcttcgctttccgacttgaggacatcgatcaggcttatttcattcccttctttatcctggccgatcggatcatgaagggagacgtcttttttcgtttttttcaatgcgcgcagatgcattaaaatctcattctcaatacatcgtgcggcatatgtggcaagcttcgtgccttttccggctgagtagctttcaattcctttaatcagcccgattgtaccgatggagatcagatcttccgcgtcctctcccgtgttttcgaattttttcacaatatgggcgactaaacggagattatgttcgatcagcatgttgcgggcgtgttcatctccttcagccataaggtctaagtattttttctcctcattatttgagagcggttgtggaaaggcattatttttcacgtatgatactaagaacacaagttctttcacaataaacccgagcgctgcaaaaacacctgtcaccgtcctcacctccacaaagttatgtaggcaatcgcctatatgtaactgtatgtggaggtagggctgtttgtgtctgtacagggaaattaatcaaaatcgggttttatttcttacagcctcttgatttttgatgattgagcctgtatattttttaaaaaagtaagggtgaaaacaatataaccgaaaagcgctgaagagacgagtagacagatatcattcatgacagagagctccgggagctgtgaaggagtatgaatggatgtgttgaaacaaacctcttagcttcgcatcggaatcatgcaacccgacgatgatgcggcggatactcctgttaccgagtaagctttgtacccggcaaggccggcaccaaaccgaattgaggtggcatagcgggctgtttcccgtcctcaagactttattgtcttgagggcgttttttatttctaagggagggataagatgaaaaacctgaagtcttggcggtacccgttgcttctgttaaccggaatcgggatagcaaatattggtgaatggatctattttttgtctcttaatcttattgtcttaaaagaaacggggtctgcttttgcggtttccatcctttatttaatcaggcctgcggctgttttgatgacaaatggctgggcgggcagcatcatcgaccggtgtaacaaacggaatatgatgatgtcgcttgatttcacccgggctgcattcattgccgttctgccgctgatggttactgcacggtctttattttccgtttattgtatcgtgtttttgattcatatggccaatgcgatgtttcgtccgtgttccatggcgtatgtgacgatgcttatcccggctgaaaggagaaaacgattcaattcactaagggctttgtcggaatcaggggcttttctcctcgggccggctgcggccggactgctttttatcgccggcacgccgatttttgcgatttgggtgaatgcggcggctttagtgctgtccggtttcatcacgatgatgctgccgaaccttgaaaatgagcctcacgtacattctcccagacagaagctttctttggcagtgtgcaaagaagattggaagctcgtctatcgcttcagccgaacggcgcgaaacgtcatgatcatttattttttattcagtctggtcatgaccgttatgccatccgcgcttgattcgcttgaagccgcttttgcaaaagaagttcttcagctgactgatgccgattatggttttctcgtcagtgtctcaggggcaggcattattgcgggagcgcttgtcaatgtgttctttaataaaaaaatgccggcttctttattgatgggaatgggctctttattcacagcggccggatatatgatttatgcgttttctgacgttttttggacggctgctttcggatttttccttctcgctttttttctggcgtttgccaatacaggctttctgacgttttatcaaaagaatgttccggtggacatcatggggagagtggggagcttttattcattagtcgaagccgtcttcattatagtagtaacggcggttttcggagcggcttctgtcagttcttccgtccgcggcatcgtcatcgcaggcgctgctgttatgctggcgttggcagccgttttatgctcgttcttatttgcggccgcaagaaggaggactcctgatgtatttcaagcggatcaatttaaacaaacataaagagacggccgtttcgtttggtgaggattcgtttttcgtcagctttggcacggcggatcattttaatagggatgaatatctcaggtggctgtcatcccaaatcaaatgctttcccgacggttttatgctgctttttcataacggacagccgatcggacagctagaagcttccatcaaattttaccgcagccaaaaaatcggttatgtgcacctttactatatgactgagaagcagaggggaagggggtgcggaacgaaaccgcatcaatacgcgaatcagtttttcagagcgaacggtgtttcggaatatcacctgagagtttcgccgagcaatgaagcggctctgtcattttacagaaagaaaaacatggaagtgatcggttcagaatgtaacggaaaagttctcagaatgagaggagccgtaccgccggaatagggggcggtacgcgcttcattttttcgttgtttttaaaaggccgggaaacttcttataaatgaccgccattaagacgagcatatacattccgtaaatcccgaaagacagcagtttgttgcttgtaaatgaagcgcctgcgacggtcacgatcacaatgttcggaattttgccgagcaccgacgcagaaaaaaagatcggccatcggatattactcagcccgcagacggtattcatggcaagcgacggtataatcggaatcagccgcccgaaaagcaccgccgtaaacgcgtgctgatgaaatgaatcttcatattgggccgctgccgggtaagccagcagcttttttctggcccagtctctgaatccgtaccgaacgagaaaaaacaacgccattgttccgagcatcgcgcctgacaatgtaatccacaccccgtttacaatcccgaaaaccgctccgtttaaggccgcgataatggcgaatggaacaatcggaaaaaatacgtcagctgcgaccagaaggatactcataagcacggcgtacatgccgcccgcgcgaatcatgctgagccagacgtctttttgcaaaaagccgatcatcacgacagcaatgatgacggcaagactgaatcccttttttatcatctgcacgttcacctcttttcaattagtatacagcacaaatctatctccttctattaaaataagctgtccgataagcgtatttgatttatcagcatttgccgtttgatgagaaacggctgcacccggatttggacaaaaacaagcgggtgatgtgcatcatttgatgcagagaatgattttttataaaaggggacacgttaacagtagtgtttactggaggtgtaaacgttgagatgctttcatctgatcatcatgatatgcgtcctcacgagtctcactgccgtgtccgccgatgcgaaatctttaaaaagaagtgacatggagaaaacgggaaacgtgtactgggataaaaggtctgaaaaaaagaaactatctttaaccttcgatgacggcccccatcctgtctatacggaggctgtgttagacgtgctgaaacagcacaatgttaaagcaacctttttttgtgtcgggagccgtatagacaaataccccataacggcaaaacgcatcgttgaagaagggcatgaaatcggcaaccatacgatgaaccatgtttattttcaccgactgaaacgcaaagacattttacaagagcttcacagctcagcgcatcatatcacatcgctacagccggaaggggacaagttattccgcccgccgggagggtcgctgaatcatacggctttcaaaagcatcttaaaagagggctatcatatcatcatgtggtcatggaaccaagatccgagggactggaaaaggccagggaaaggaaaaatcgtcaggcacgttgtttcacatgccagagatggagatatcgttcttctgcatgacggcggaggaaaccggcgccagacggttgaggctttgaaagaaatcattccaaagctgaaaaagcagggctacacgtttgttaaggtttcggatttgatcggacaggattccggtccttttcatatccagtaaagagagcgccgcgttgaaagccgccaaagagatgtgtaccataggaggtaaggtttggggggagagaaaatgaagtttgctgttctttttattacgataatctgtctgttatcaggatgcgccgcgggcaaagaaaaaagtgttgtcgcgttcggcgacagcaatacgcgcggttccaactgggattatcgtgattatccgaaggcgcagcagtgggtaaacattttaaaaacagcggaacgcggccgtcttacggttataaatgcgggaataggcggccagacgactgaggatgcgcgcctgcgttttcaaagcgacgtgctggaccgtaagccccaatatttatttatcatgttcggaacaaatgatgcgggcattttgacgggcgatcagccgcgggtatcaaagaaacggtttaaagaaaacctgacttatttcataaacgaaagcagaaatcacggcataaagccgattttaatgacgtgcatcccggttatagaaggaaacggaacgcatcatctctattactattcgagatataaagcctcagcctttaaagaaaaaggcggcgcgagaaaatggcataattcctataacggcgttacgaggcaggttgcagctgagttgaaagtgccgctggtggataactggaaacactttatacgcgcggacggcggcaaagatacagaccgggcgctgattcaatccggactgatagatccctccggaaatcatatgacgccaaaaggcgccagaatcttaattgaaggcataaaaaatgggcgggttttggaacgctgacgccgtcagctgcctaaaccgttttgcttctgcttcataggctgtagaaaaaacatctttttggaggcgattgctatgaaccgcggtttccctccgcaatatcctgtatgcccgcctcctcgggtgaatgcggggtactggtacgcattttttgttgtgctgctcgtcgtcattctcgtcctgggcggtctgtattggttcaatatatagcagctgtcctcttaaacacctctattttaggggtgttttttgttgaaagtggtagtaatgcgcataaccgaagtgatataatatcagtcatctgagtaaaaaaaggaaattcgcccgggaacttttttctgtttaagaagaaacggaaataatgtgtccgagcgatcttcttttaatttcgctttcaattaactcgataaattcacggctcaaattcatttcattggctttgaaataagattctattagtaattcatcagaaagctttctcatgccggggacccaattaatgggagtggcacctccttacaattgtaatcaatcatcagacgcaagcatatgatggaaggttgcgtttcaatcatggtgaggttatctttaatctaccatgaaatacaaataagaacaatcgttctgttatccacactcgtaagtggataacctgttagtatcttgtttataatctggataaatccggatgtaataagagtggataatgtgtgtaattttatccacaactggtgaagaaacccaatttttgtcgaaatttttttactgagtccgactttgtttttaaatctgacaggtttcgacatatagatggtagaaagaaaaggaagggtgcgggttttgttaaaaaagttttttttacctgacgaatttgtgaaaaatatatttcatatcacaccggaaaagctcaaagaacgcaatgtgaaagggattattacagaccttgacaacacgcttgtggagtgggacagaccgagtgcgacacctcgattaatcgagtggtttgaagaaatgaaggagcacggcattaaagtcacgatcgtctccaataataatgaacgaagagtgaaattattctcggagccgcttggcataccgtttatttataaggcaagaaaaccgatgggacgcgcctttaaaagagccgtcagcagcatggatctgaaaaaagaagactgtgtggtcatcggcgatcagctgcttactgatgttctcggcggaaacagaaacgggtatcatacgatcctcgtcgtgcctgtcgcttcctctgacggagtcatgacgcgctttaaccgccggattgaacggagaatattgagttctttgaaacgtaaaggccatattcagtgggaggattagaaatggaaaaggttgtttgcatcggctgcggagtaacgatccagaccgaggataaacaaggtctcggatacgcgccaaaggcatcgctcacgaaagagaatgtcatctgccagcgctgcttcagactgaaaaattacaatgaaattcaagatgtttcattaacggatgatgactttttaaatatcttgcacacaatcggcgatactgactctcttattgtcaaagtcgttgatatttttgattttaacggaagctggataaacgggctgaaccgctttgtcggcggtaatccgatcattcttgtcggtaataaggccgatatcctgccgaaatccgtaaaacgggaacggctcgttcaatggatgaaacgcgaagcgaaagaatacggcttaaaaccccttgatgtctttttaatcagcgcttcccgcggacaagggatgaaggaagtcattgacgccattgaacattaccgcgaagggcgcgatgtgtatgtggtgggctgtaccaatgtcggcaaatccacatttatcaaccggattattaaagaggtctcaggggaagagaatattattaccacctctcaatttccgggcacgacgcttgacgcgattgaaatcccgctcgatgacggatctgcgctttatgatacgccgggaatcattaaccatcaccagatggcgcattacgtggacaagcgtgacttaaaggtgctgacaccgaaaaaagaactgaagccgcgcacttttcagctgaatgaaaaacaaacgctttatttcggcgggcttgcccggtttgactatgtatcaggcgataaaacggcgtttgtctgctatatgccgaatgaattgatgattcacagaacaaagcttgaaaatgctgatgccttatacgaaaagcatgcgggagaactgcttaccccgcccggaaaagatcatttggatgaatttccggagcttacgccccacacgtttacgattaaagaaggaaagacggatatcgttttttccggtctcggctgggtcacggtgcagcaagaagataaaaaaataacggcatacgctccgaaaggcgtacacgtatttgtccgccgttcattaatatagagagaaggggagagggagcatgaaacaattgtacggagtaatcggaaatccgatcgggcattcaatgtcacccgatattcataacgcggctttgcaagataagaacatcaacgggcagtattttgcgtttcaggtggaacctcatcatctcaaggacgccgttaacggaatcaaggcgcttggcatctgcggagtgaacgtcacagtcccgcataaagtcgcgatcatggagcatctggatgaaatacatgaaagcgcgaaagtacttggggccgtaaataccgtcaaaagagagggagacaggctcatcgggtataatactgacggagatgggttttataaatccttagtcaaagtattggacaaaccgatatcagagctctctatcctcatgattggggcgggaggagcggcaagagcgatttttacgacgatcgtccgcggagagccgaaacaatttgacgtttgcaaccgcacgccggaaaaagcggaaagcctgattgcggctgctccctcttttcagcagaaacgcgcccttactttaaaagaagctgaaaatcagcttgaacaatatgacgtcattattcatacaacatctgtcggcatgtatccgaaaacggatgccgtgccgctctcattggaacgggccaaaacgggcgccatcgtttgtgatatcgtatacaacccgattcaaacggcgttcttaaaagaagctgaaaaaagaggtttaacaacccttgacggtgtcggcatgtttgtggaacaggccgcactgtctttcaagctgtggacggaacaagagcctgacagcggcttaatgagagcgattgttgaaggaaaactaggaggaacacaatgttaacaggaaaacaaaaacggtttttgcgttcaaaagcgcatcatttaacgcctatttttcaagtgggaaaaggcggagtcaacgaaaacatggtgaaacagattgccgaggctttagaagcaagagagctgattaaagtcagcgtgcttcaaaactgcgaagacgataaaaatgatgtcgcagaagcccttgtgaaaggcacccgctcacaattggtgcagacgatcggaaatacgatcgtattgtataaggaatcaaaggaaaataaacaaatcgagcttccgtaaggtggttgacatgaagaaaatcggaatattcgggggcacatttgaccctccgcacaacggacatcttctgatggctaatgaagtccttcatcaggcggagctcgatgagatttggtttatgcccaataaaatccctccgcataagcagaatgaagactttacagacagccggcaccgggtggagatgctgaagcttgccatcagctctaattccggctttaagcttgagcttgcggaaatggaccggaaaggcccttcttatacctatgataccgtccgtttactgaaggagcggcacccgaacgacaagcttttctttattatcggggcggatatgattgaatatctgccgaaatggtacaaactggacaaactgctcacgctcattcaatttatcggagtgcggcgcccggggtatcatattgagaccccgtacccgctgctttttgccgacgttccggaatttgacgtttcgtcaacgatgctgagagaacgtctcaaagcaaaaaagccgacgcaatacttaatgccggataaagtgaggcagtatatagaggagaatgatttatatgaatcgtgaggaagcacttgcctgcgtcaaagagcagctgaccgagcatcgctacatccacacaatcggcgtgacagatacggcggttattctcgcaggccggttcggagcagacccgaaaaaagcggaaatggcggctatttttcatgattatgcgaaattccggccgaaagaagaaatgaagcagatcatcgtgcgggaaaaaatgccggctgagctcttggattacaatgccgagctgtggcatgcccctgtgggagcgtatttggctgagaaagaagcggggatcactgatcctgagatcttggatgcaatccgttatcacacgtcagggcgtcccggaatgacccttttagacaaagtcatttacgttgcggattacattgaacccggacgccatttccccggagtggaagaggtgcgccgtctggcggaaacggatctgaacgaagcgctcatacaagcgatgaaaaatacaatgatatttctgatgaaaaaaaaccagccggtctttccggagacgtttgcaacctataactggctggtgtctcaaaattgacaggaggaatatggaaatgaatcaagcttccgtattaaaaatcgcggcaaaagcatgcgacgataaacgtgcagaagatattttagcgctggacatggaaggaatctcacttatagcggattactttttaatctgccacgggaattctgataagcaggttcaggcaattgcgcgtgaaattaaagatcaggcagaagaaaacggcattgatgtcaaaaagatggaagggtttgatgaggcccgctggattttagttgatctcggcgacgtcattgtccacgttttccataaagatgaaagaagctactacaatcttgaaaagctatggggcgacgcgccgctcgcagagcttgaactcggcttgaactcatgatttaccaaggcttcgccggcgtatatgacgagttaatgtcacatgcgccgtatgatgaatgggcgggctggatcgaagcgtctcttccggaaaagggaagggtgcttgatcttgcctgcggaaccggagaaatatccatcaggcttgctgaaaaaggctgcgaagtcacggggattgatttgagtgaagatatgctgagctgtgcccagcagaaaaaaacgggaaagccgattctttttctccaacaggatatgagagagctttccggttttgaagaacagtttgatgccgttgtcatctgctgtgattccctaaattacttaaaaacgaaaagtgatgtcttaagcaccttcaaaagtgtttttcaagttttgaaggagggcggcctgcttctgtttgacgtccattctccatttaaaatgacggagctttttccggacagcacccatgcggatcaggatgagcagatcagctatatctggcaaagctttgccggcgatgaagagctttctgtcatccatgatatgtcctttttcgtatggaacggacaatcttatgaccgttatgacgagacgcatgagcaaaaaacattttacattgaagaatatgaacaaatgcttgcagagaccggatttgaactgaagaaggtgacggctgattttacagaccggcctccttcaacagagtctgaacgtcttttctttacggcaggcaaaccaaaaaccatcgtttaaacggaacgatggtttttaaaatgcattttttgcgattggcgcgataaagcactttatggcatactcagttacacgtgaaattgcttcttcactaacgatatatcttcatcgtatttgtcatgtgtacgctgaaagacacggttgaacatatcctgaacaccgctttcgagagccttcagtccttccccggtgacgccgccttttacgcatactttttcctgcaaggcgggaagcgtgtaatgccctgtttccagaagctttccgagaccgacaagcatctccgtcgacataatcacggcttcttctttggtgatgtccgtttcttccactgccgcgtcaataaagcgctgaacgagataactcataaaagcgggcccgcagctgacaatgtctgacgccgctcttgtaatgccgctgctgatttccacaggttttgaaatatgagtgaacagcgtttgaatatccgcttttgcagactcgctgcagcttttgccgaacgtaacaagcgagacgccggccaaggcgcggttcgtaatgctcggaatgacgcgggccgtctgacacggaaccgtatgttcaatctgatccgtctgaacggggctggtaatggagattaaaatgtgatctttccgtaaatgcggtgtgagttttttcagcaaaggatatatatccagcggttttacacaaatgaatattatttcattatcctgtacgagcttttcctgatcctcggtgacatggatgccgctgaaacgttcttctagttttaatgctttttcgattgttctgtttgtgatggtgatatgtgagggatcggcagcgtttgattcgataaacgattcaatcaggatcgttcccatgtttccggtgccgataaagcctattttcaatgaattcccctcctttttcccttaatcctctaaaccttatgcggggaggcaatgcaatatgacgaaagcgatgatgacggagcggctgcggcggaacctgaaaattctgggcgcttgtcttgcggcaggggcggtttttatctgtatttggctgtttcgttctgaaaaggaagagccggtcaaacagcagtccgtgctcggccaaacagcctcagcatccgtcgcggacaaaaaagacaccgcagccgataagattatgattgatgtgaaaggtgcggtccgaaatcccggcgtgtatgaaatgaaagcgggagacagggtgacgcaagccattgaaaaagccggcggcctgaagaaaaaggcggatgaattgaatgttaatttagcagagcagctgcaggacgggacgattgtttatattccgagtgaaggcgaagaggagaatcgcccgaaaacagcggcgggtgaaaaggagaatgcagctgtcaatatcaatacggcatctctggacgaacttcaggcgatttctggggtggggcagaaaaaagcggaagcgattatcgcctaccgagaagaaaacggacagtttcagactgctgaagatttgatgaatgtatcaggctttggagagaagtcatttgagcggataaaaacttccattacggtaaagtgaattgacggttttgcttaaatctatgtaaacttagaaaagcaacaagactttttggagggaacacttgtggaacgaatctcatggaatcaatattttatggcgcaaagccatttgctggcgctgagaagcacatgtccgagactgtcagtcggggcaaccgtagtcagagacaagcggatgattgccggcggatacaacggctcaattgccggcggcgtccattgcgctgatgaaggatgccttttaatagataatcattgccagaggaccatacatgcagagatgaatgcgattctgcaatgttctaagttcggtgttccgacggagggcgccgaaatttatgtgacgcattatccttgtattcaatgctgcaaatcaattatccaggcaggcatcaaaacggtctattatgccgaagattacaaaacacagccttatgcaaaagagctgttcagccaagccggagtcaaggtggagcaggtcgaacttgatgagatgatcatcgatctgaaaaaccgtgaaaaattgtcttttgtagcaggtctgattcagcaattatctgatgcgggggttaaggcagatgaactgaaaaaaattcatgaacaggccaatgagctgtttaccagttacgtataaatgaaatataaataccttcttctgcctctggcggcggtttctgcaactgcgggaattgccgccgctcatgtcttctgggttctgctcctttttcttctgtatcttctctttattattgtaaaaacaaagcagtatgctccggttatcgtctgcctcgtttctttttgtctttatttctttctttatacggtttgtgacgctgcgaatgtaacgcgctatcaggccggcagttatactgaacaggccgtcatcactaatattccgaaggttgacggagcgaaaatgtcagctgttatccgtacacatgacaaggaaaaatgggcggcttcgtacaaaatccgttctcttgaggaaaaaagactcattgaacagcttgaaccggggatgcgctgcacgtttacaggctctctggaacagcctgcacatgcgacggttcccggaggttttgattataaggaatatctttactctcagcagattcactggttattttccgtgacttccattgagcagtgtgaaaaatccaaacagccgctgtttaaactgctgaacatcagaaaaaatttgatttcgatcattcggaatcacgtgcctgaatcttccgccggaattgttgaagcgctgaccttaggtgaaagattttctatagaggacgatatactgagtgcgtatcaaaatttgggagtcgttcatttaatggcgatttccggaatgcatgtcggtcttattacggcgggattattttatgctctgatcagaatcgggctgacaagagaaaaggcgggaattttgctgctgctgtttttgccggtgtatacgctgctgagcggtgccgccccatccgtattgcgcgcatccctcatgctggggttttatatcgccggaactcttgttaaacgcggcattcattcctctgctgcattgtccctgtcttatctgctgcttctgctgtttaatccttacttcctttggcaggcgggcttccagctttcctttgcggtaagcgcctctttaattctgtcatcctccattttaaagaaagcagggaaaagcagacttgccgggcttgcgatggcttcattgattgcagagctcagctcacttccgtttcttctctatcattttcagcagatttcacttgtcagttttccgatgaatatggtgatggtgccattttatacgttatttgtcattccggtttctgtcatcggtttccttcttcttttactctcaaggcaggtgggagaatgtttgtttgatatgtttgaccttgtgatgaagcctgtgcatgatttcattacatatgcggcatccgttgatttatttactatgattgtgtcaaagcctgactttctttcccttctgctgcttgcggtttccgtttttacgctttttgcggctttggaaaagggaggttttttaaaactcaggaagtcggctctttttttctgcgcggttttggcttatttaatatgccgtccgtatttcagtccatggggagaagcggatatgcttgatatcgggcagggagactcactgtttataagcgcgccgcaccgcaaagggaccgtaatggttgatacagggggagtgattgcttatcccggagaatcatggaaagaaaaacgtcacccgtattctatcggcgagaaggttttgattccatttttaaacggaaaaggggtgaaaaagctggatgcactgattttaacccatgcggatcaagatcacatcggggaagccggagtgttaatcaaaaatcatagagtcaaacggttaattgtccccgtaggattcgtaaaagaaccgaaagatcagaacatattaaatatggcgaaagaaaataacattcccgttgccgaagcaaagcggggcgacaccattacagccggtgatcttcagtttcaggtgctgtctccggagtcgtctgacagaaggagtaaaaatgattcgtcactggtgctttggacggtttttggcggagtgagctggcttttgacgggagatttagaatcggacggcgaaacagaagtgctgaaaacgtatccgaatctgaaggctgatatattgaaggcgggtcatcacggcagcaaaagctcaacgagtgaagcctttttgaagcagcttcagccggaagcagcgctgatttcagcaggaaaagagaatcgataccatcatccgcatgaagaagtgctggatcgtttgaaggcgtactctgtaaatgtgcttcgcaccgatatcagcggaacgattcaatacagatttaaaaaaggcgccggaacgttttccgtcttccctccatatgatatagaagaaaccagggcgcaagaagtaaaaaagactgccgattgacagcagcccggaatgcggctaagagccgataagatggatggctgttgccatcacgaacaaaaaggcgaaaaatccgaaggacacgacaaaaccgacagctgagtcaacagcatcatttcgtttgctttgaacgtttttttcaaaatcattcaatttcatccctcctgacttccctaagtatactggaattgttttgaaaaatctagaagtgatggtaacgttttctgttcttgtgattatcgcctttttacaagcagacccgggagcttgtgaatcaggcgtttattataaatgaggaagctgtccttaaagcttcctctttactaattgccgaactcaatttaggatagaaggggatcaagaaagagaggaagtcatacgatcatggtatttgatgtttggaaagccctgaaaaaaggggatgtccgctccgtttattgtttatacggaaaagaaacgtatctgctccaagaaactgtcagccggatcagacaagctgtcgttgatgaggagacaaaggattttaacctgtctgtttttgatcttgaagaagatccgcttgaccaggccgtaaccgatgcggaaacgtttccgtttatgggggagaagcggctggtcatcgtaaaaaatccgtcttttttaacaggggaaaaaaagaaagaaaaaatagagcataatacagccgctctggagacttatctgaaggagcctgcaccttatacggtctttgtgattgtggctccgtacgagaagctggacgaacggaaaaagctgacgaaagcgctgaagcaaaaagcccttatgattgaagctaaggagctgaatgcaaaggagacgactgattttacgattaatctggcgaaatccgaaaataaaacgatggatacagaagctgccgagcatttggttctgcttgcaaacggtcatctgtcttccatatatcaggaaatacaaaaactctccgcctacaccggtgacagacatgagatcacgcttgaagatgtccgggagcttgtcgcaagaagtttggagcagaatatttttgagctgatcaacaaaatcgtgaaccgaaaacggacggaaagtcttcaaatattttatgatcttttaaaacaaaacgaagaaccgatcaaaattatggcgctgatcgccaaccaattccgtctgattatgcagacgaagtattttgcgggacaaggatacggccaaaagcaaatcgcttccaacttaaaggtgcaccccttccgggtaaagttggcgatggatcaggcgaggcttttttcagaagaagagctgcggcgtattatagaaagactcgcagtgatggactatgaaatgaaaacggggaaaaaggacaagcagctcttgctggagctctttctccttgagcttctccgcactgaatgaaaaaaacgatccccgttaaagggatcgtttttgtattatgcagaaagtccgttcacttgtttcgcaagtctagatttgtatcgagctgcggcatttttgtgtacaagacctgttttcactgctttatcaatgcgtttcgctgcttcagaaagagcagttttcgctttatccgcttcgttgttagcaacagaagcttcaacttgtttgattgcagtacgcatagcagatttgattgtcgcgttatgagcgcggcgttcgttgtttgtttttgtacgtttaatcgctgatttaatgtttggcatgtgtttcacctcctaagatacaacctgtagcacagtgtcttaaggttaaatcttcttcacaatagaacaaattgtattctatcaaacagaactttagattgcaatataaatgtaaagtatttttcgttgatgggtaaattcgcatgattcgttttgtaaatggccacactatgtaccacgatgattgaaggaggtcttccctgtgaaaaacaacgaactggatgtcaatcaatttctgatacggacggatttagcggtagaaacgaaacaggcggtaaaagacggacaagccggtcagaaaaaagaaataaacgggtttattgaaaaagaacgcgacaagggcggcattaaagtcagaaccgtcgatattaccaaagaaggcgccgagctatcggggaaaaagcagggacgctatgtcacgatcgaggctcaaggggtccgggaacacgactctgacatgcaggaaaaagtaacggaagtgtttgccgaggaattttccgcctatctgtcggcattaaagattccaaaggatgcaagctgtttgatcgtcggtctgggcaactggaatgtgacgccggatgcgctcggccctctcgtgaccgaaaaccttcttgtgacaaggcatctgttcaggcttcagccggaaaacgtgcaggaagggtacaggccggtcagcgcgcttgctcccggtgtgatgggattaacgggaattgaaacgagcgatattattcaaggtgtgatcaaagaatcaaagccggattttgtgatcgcggtagacgctcttgcggcaagagccgttgaaagggtgaacacgaccatccaattttctgatactggcattcacccgggatcaggcgtcggcaataagagaaaagaattaagcaaggaaacgctcggcattcccgtcatcgcaatcggggtaccgactgttgttgacgcggttacgatcgcaagcgatacggtggattatatattaaaacatttcggaagagagatgaaagatgacagcccgtcaagatctctggtgcccgccggaatgaacttcggcaaaaagaaggtgctgacagacgaagaccttccgggagaaaaagaacgccaatcctttctcggtattgtcggcacgctggacgaaaacgaaaaacgccagctgattcacgaagtgctttctccgctcggccataatctgatggtcacgccgaaggagattgacacctttattgatgatatggcgaacgtacttgcaaacgggttaaacaccgcccttcatgaaaaagtgtcacaagataacaaaggttcttataatcattaaaatgagttctacctcctctagcttgttcatagagtaattactagacaagcgctggagggattcaaatcatgagaaaaaaacgcagaaaccgtcaaattgtcgttgcagtaaacggtggaaatgcgctcaagggcatgtttttgtttatgacaagccttatcgttattttcgtattatcgggtgtgctcacatcgcttcgccctgaactgaggctttcttcggattctcttcacgggattgccggagaacttccgggtgacgcgtttgcacacctcctcggcatggaaaatcattatttcgcctcagagcttcctgaaaaagactcttttcagctgtcccggctttccttaaaactggcgacaagcattaatatggaagacccgcggagtttcttgggacgtgagctgccgggatttgcccaatacgatacggagatccttctggcggggcaggggacggattatacgaatatgccggctgaatctccgccgccgtcaaaggtgatggaaaaagaaaaagaagtgaacctggcagaaatcgaaaacaaaacgaaaaaagaagaaacggcgccgccgaaacattcaacaggcagcaaaaaagtcgtttttatttaccacactcataatactgaatcctatcttcctctgttaaagggggaaacaaatccggataacgcccgccattcgaaggccaatgtcacacttgtcggagatatgttcggaaaagcgcttgaagcgcaaggtgtaggagcgaccgtagataaaaccgacattcaggcccgtctgaacaaagacggtttaaattatgcgcgaagctacgacgaatcaaggccggtcgtaaaaagcgcgctcgccaaaaataaaaacctgcaatataccatagacattcaccgggattcccgccgcaagaaaaatacgacagccgacatcaaaggaaaaagctatgccagagtcgccatcgtcgtcggcaaaaaaagcgctaattttgaagaaaactataaactcgcaagtgaacttcataagctcatggagaaaaaataccccggcttaagcgtcggtgttttatcaaaaggctctccgggagataatggagtatacaaccaggatttaaacgaccggtcgcttctgctggaattcgggggcgtggataacaatcttgaagaactgaggcgtgcatcagatgccgtggccgatgtgttcagcgaactgtactgggatgcagaaaaggtcagctcgcaatcaggagagaagaaaaaacaatagaaatcaggtgattcgaatgatccgttttaccggcaaatgcctgctgatcgccattgtcatgtttttcggcgttttgttcggcatgcagcaggcaaacagcggaatgcttgatatgaaaggatacaaagatccctccttaaaaggagcattcacgctcggcggcggagaaggacaggaaaaagaagcttccattttggggcaaaccgttacggcgaaagatctggaagaaaaacaaaaacagctggaacaggcggaaaccttcaacctgttttcaaaagccggagaaaccctttcaaataccgtgacggactcggcgcaggcgatgtatgagtgggtttcgaaactgaaccgttagcattgatgaagagaaaagcggatgattccttaaaggaagcttttctctttcttgttttaattgaatgtttacaatcctattgatataatctaagctagtgtattttgcgtttaatagtaggagtgatagattgtgacagataaagaaaagcgtttagagaggcagtcaagaatccggaatttctccatcatcgcccacatagaccacggcaaatcgaccttggcggatcggattttagaaaaaacatcggcgatcacccagcgggaaatgaaagaacaattgcttgattcaatggaccttgaacgcgaacggggaattaccatcaaattaaattccgttcagctgaaatacaaagcaaaagacggagaagaatatatatttcatctcatcgacacgcccggacacgtcgactttacatatgaagtttcgcgaagcctggctgcctgtgaaggcgcgattctcgttgttgatgcggctcagggaatagaagcgcagacattggcgaacgtctatctggcgcttgataatgatcttgagattcttcctgtcattaataaaatcgatctcccgagcgcagagccagaacgtgtgcgtcaagaggttgaggacgttatcggccttgacgcttcagacgccgtcctcgcttcagcgaaagcgggcatcggcatcgaagacattttagaacagatcgtagaaaaagtgccggctcccgcgggagatccggaagctccgctgaaagcgctcatctttgactcgctttatgacgcgtaccgcggagtcgtcgcgtatatcagagtcgtagaaggaacggtcaaaccgggccagaaaattaaaatgatggcaaccggaaaagagtttgaagtcatcgaagtcggcgtcttcacgccgaaagcgcagccggctgacgaattgacagtcggtgacgtaggctatttgacagccgcaatcaaaaacgtcggcgacacccgtgtcggtgatacgatcacgagcgcggttaagcctgcggcagaagcgcttccgggctaccgcaaactcaatccgatggtatactgcggactttatccgattgacacagccaaatataatgatttgcgcgaggctctggaaaaacttgaattgaacgattcatctcttcaatacgaggcggagacgtcacaagccctcggcttcggcttccgctgcggttttttaggaatgcttcacatggaaatcattcaagagcggattgaacgggaatttaaaattgaccttatcacgaccgcaccgagcgttatttatgacgtttatatgacggacggcgaaaagatcatcgtggataacccgtcaaacatgcctgacccgcaaaaaatagagcgggtggaagaaccttatgtcaaagcgacgatgatggttccgaacgattacgtcggagcggttatggagctttgtcaggggaaacggggcaactttatcgatatgcagtacttagacgccaaccgggtcagcattgtatatgagatgcctcttgcggaaatcgtatatgaattttttgatcagctgaaatccagcacgaaaggatacgcctctttcgattacgagctgatcggctacaaaccgtctaaacttgtcaagatggacattatgctgaacggagaaaaaatcgacgccctttcatttattgtgcatcgcgattacgcgtacgaacgcggaaaagtaattgtggaaaaactgaaagagcttattccgcgtcagcactttgaagtaccgattcaagcggcgatcggacagaaaatcgtggcccgctcaaccattaaggccatgcggaaaaacgtccttgcaaaatgttacggaggagacatctcgcggaaacggaagcttcttgaaaaacaaaaagaaggaaaacgccggatgaagcaggtcggctcagtagaagtgccgcaggaagcgtttatggccgttcttaaaatggatgacagcccgaaaaaataacggaagccgccgcagtcccgcgctgcggcttctttctgtaaagaagaaggtgtttcaaaatgaaatcagcttatattcatattccgttttgtgagcatatctgccactattgcgatttcaataaatattttattcagagccagcctgtcgatgagtacttaaactcactcgaaaaggaaatgataaatacaatagaacggacgggacgccctgatctccgcacgatttttatcgggggaggcacgccgacatcgctctcacccgtccagctggaaaaattgatggattccattcaccgcgtgctgaagccttctgacggactcatagaatttgccgcggaagcgaatccggatgatttgtctccggaaaaattaaaaatcctgaaaaatgccggtgtcaaccggctgagcttcggtgttcaaacctttgaagatgagcttttacaaaaaatcggcagagtgcataaacaaaaggacgtattcacttcctttgaacgtgcgagggctctcggcttcgacaacatcagtctcgatttgatgttcggcctgccgggtcagacgctggccgatcttgacaattccgtcaaaacggctttgtctcttgatgcagagcactattccgtttactcgctgatcgtagagccgaaaacggtgttttataatttaatgcaaaaaggccgcctgcatctcccggcgcaagaacaagaggccgagatgtatgaaacggtcatgaggcagatgagtgaagcgggcatccttcaatacgagatcagtaactttgcaaagcccggatacgagtcgcggcataatctgacgtattggagcaatgaagagtatttcggttttggcgcaggcgctcacggatatatcagcggcacgcgcaccgtcaacgccgggcctgtgaaacattacatgcagctcatcgaagaaaaggggctgccttaccgtgacacgcacgaggtgacacgtgaggagcagattgaagaagaaatgttcctcggtctcagaaaaatgtccggcgtacaaaagcaagcttttctcgataaattcggacgctcggtcgacgaactgtttcccgatgttctcaaagatttaaccgaaaaaggcctgatttgtgacacgaaagaatcggttgcattaacgcatgagggcaaattattaggaaatgaggtttttggcgcttttttgggtgagttataattgacatttttcttttggtttgttacttttgatatagaattagcactcgctgaccttgagtgctaacaggggtgatgatgatgttaacaaatcgtcagctgttgatcctgcaagtgattattaatgattttatacaatcagcgcagcctgtaggatcaagaactctttcaaaaaaagacgagattacattcagctctgcaacgatcagaaacgagatggctgacttggaggaattgggctttattgaaaaaacccattcatcctcaggacggattccgtcggaaaaagggtacaggtattatgtcgatcatttgctgtcacccgtcaagctgacaaaaaccgatctggatttaattcactcgatatttaaagaaaaaatcttcgagctggaaaaaacagtccaaaaatcagcgcaaatcctgtccgacctgacaaactacacatcgattgtcctcgggccgacgctgagcgagaactatcttaaacagattcaaatcgtaccgatccagccggataaggcggtcgccattctcgtcacgaacacggggcatgtcgaaaaccgcaccatcaatttcccggctaaagtggatttggccgatattgaaaaactggtcaatatactaaacgatcgattagcgggcgtgccgatggacgaactgaatgagcgcattttcaaagaggttgtcacatatttaaggcagcatatcgccaactatgacagcatacttgaatcgctccgctccacattccatccggcggcccacgttgagaaattgtttttcggcggaaagatcaacatgctgaatcagccggagttccatgatattgaaagggtccgctcgctcttatctttaattgaaaaagagcaggatgttctgaagctgtttcagtcatcaaaagccgggatttcaatcaaaatcgggaaagaaaacgactacgaagaaatggaaaactgcagcttaatcacggccacctatacagttgatacgaaacagatcggatcaatcgccattatcgggccgacgcgcatgaattattcaagagtcgtcagcctgctgcagcacgtgacttcggacttgtcaaaagcattcacaagtttgtatgatgaataagggaattttggcaatcattttcagtcatctttttacagcatttgagggaggtgaacacaatgtcagaagaaaaacaaaccgcagaacaggttgaagcagcagaacaagaagaagtgacagaacaggcagaacaagccgcttcacaagagcagcatgaagaaacggcaggtcaggaagaagcccttcagcaccaaattgatgaattgcagggtttgcttgatgaaaaagaaaacaagcttttgcgtgttcaagcagactttgaaaactataaacgacgcagccgccttgaaatggaagctgctcagaaataccgttctcaaaacgtcgtaacggaaatccttccggcgctcgacaactttgaacgggcgttacaggtagaagctgaaagcgagcagacaaaaagcttgctgcaaggtatggaaatggtccgccgccagctgatggacgcacttgaaaaagaaggcgttcaagccatcgaagctgtcggccaggaatttgatccgaaccttcaccaagccgtcatgcaggtggaagatgaaaacttcggcagcaatattgttatcgaagaactgcaaaaaggctacaaactgaaggatcgcgtcattcgtccttcaatggtaaaagtgaatcaataactacatagcaggaggtaattcaaagtgagtaaagtaatcggaattgacttgggtacgacaaactcatgtgtggcagtgcttgaaggcggagagcctacagttatcgccaacgctgaaggaaaccgtacgactccgtcagtcgttgcatttaaaaacggcgagcgccaagtaggggaagtggcaaaacgccaatccatcacaaaccctaacacaatcatgtctgtcaaacgccatatgggtactgactataaagtggaaatcgaaggaaaagactacacgcctcaagaagtgtcagctattatccttcagcatctgaaagcatatgctgaaagctacctcggcgaaacagtttcaaaagccgttatcacggttcctgcatacttcaacgatgcagagcgccaagcgacaaaagatgccggtaaaatcgccggtcttgaagtagagcgtattatcaacgagccgactgcagcagcgcttgcatacggacttgataaaacggacgaagaccaaacaattcttgtttacgaccttggcggcggtacgtttgacgtatctgttcttgaacttggcgacggcgtgtttgaagtccgttcaactgccggtgacaaccgtcttggcggggacgactttgaccaagtcatcatcgatcatctcgtagcagaattcaaaaaagaaaacggcattgatctttcaaaagacaaaatggcgcttcagcgtttgaaagatgcggctgagaaagcgaaaaaagatctttccggcgtttcatctacacaaatttctttaccatttatcacagcgggagaagcaggtcctcttcaccttgagctgacactgacccgcgctaaattcgaagagctttccgctcaccttgttgagcgcacaatggctcctgtccgtcaggctcttcaagatgcggatctttctgcgagcgaaatcgacaaagttatccttgtcggcggttcaacacgtattcctgccgtacaggaagcaatcaaaaaagaaacgggtaaagaagcgcataaaggcgtaaaccctgatgaagttgtagcgctgggtgcagcgattcaaggcggcgtcatcacgggagacgtaaaagacgttgttcttcttgacgttacaccgctttctcttggtattgaaacaatgggcggcgtgttcacaaaactgatcgatcgcaacacgacaattccgacgagcaagtctcaagtattctcaactgcagctgacaaccaaacggctgttgacattcacgtgcttcaaggtgagcgcccgatgtctgccgacaacaaaacgctcggccgcttccagcttactgatatcccgcctgcaccgcgcggcgtaccgcaaatcgaagtttctttcgatattgacaaaaacggtatcgtaaacgtaagagcgaaagatttaggcacaggaaaagaacaaaacattactatcaaatcttcttcaggtctttctgatgatgagatcgaacgcatggtaaaagaagcggaagaaaacgctgacgctgatgcgaagagaaaagaagaaatcgaagtccgcaacgaagctgaccagcttgtgttccaaacggaaaaaacattaaaagatctggaaggcaaagtggacgaagagcaagtgaaaaaagcaaacgacgcgaaagacgcgctgaaagccgctatcgagaaaaacgaaattgaagacatcaaagcgaaaaaagatgagcttcaaacaatcgttcaagagctttctatgaagctttacgaagaagcggcgaaagcgcagcaggctgaaggcggagcaaacgctgaaggcaaaaaagcggatgacaacgttgtcgatgcggaatacgaagaagtaaaagacgacgaaacgaaaaaataagttctgtcccgcatggctataggcggaagaacacacatcatattctgattcaacagacagaaagtcaaagtcaggcatctcttggctttgactttttttcttgcccgggataaaaggaattgaaaaaacataattcaaaatgatacaatctaatttatgtgagaaattcgggagagtgaagcgagatgagtaagcgtgattactatgaagtgcttggggtaagtaagagcgcttcaaaggatgaaatcaaaaaagcctatcggaagctttcaaaaaaatatcatcctgatatcaataaagaatccggagcagatgaaaaattcaaagaggtaaaagaagcgtacgaagcgctctcagacgaccaaaaacgcgctcaatatgaccaattcggccatacagaccctaaccagggattcggcggcggtttcggaggcggcggagacttcggcggcttcggtttcgatgacatcttctcaagcatcttcggaggcggcacgagacgccgtgacccgaatgcgccgcggcaaggcgcggatctgcagtatacaatgaccctgtcatttgaagacgcggctttcgggaaagaaacgatcattgaaattccgcgcgaagagaattgcgaaacatgtaaagggtctggcgcgaagccgggaacaaagccggatacgtgctcgcactgcggaggttctggccagctgaacgtcgaacagaacacgccgtttggcaaagtggttaaccgaagagtctgccaccactgtgaaggaacaggaaaaatcatcaaaaacaagtgttctgactgcggcggcacgggcaaagtgaaaaaacggaaaaaaatcaatgtcacgattcctgccggtgtggatgacggacagcagctgcgcgttccgggccaaggtgaaccgggcgtaaacggagggccggcgggagatctgtttgtcgtattccatgtgcgcgcccacgagttctttgagcgcgacggagacgatatttattgcgaaatgccgttaacgtttgcccaagcggcactcggagacgaagtggaagtgccgacgcttcacggaaaagtgaaattgaaaatacctgccggcacacaaacaggcacgaaattcagattaagaggcaaaggcgttcagaacgtccggggctacggacaaggcgaccagcacattgtcgtccgcgtcgtcacaccgacgaatctgacagacaaacaaaaagacatcatccgcgagttcgctgaagtcagcggaaacctgccggatgaacaagaaatgagtttctttgacaaagtaaaacgcgcatttaaaggcgagtaatgattggataggagttggtagttttgaaatggtccgaaatcagcattcacacaacacatgaagcggtcgaacccatctcaaatattttgcatgaagctggtgcgagcggggttgtcatcgaagatccgcttgatttaatgaaagagcgtgagaatgtttacggggaaatctaccagctcgaccccaatgattaccccgatgagggtgtcattgtcaaagcgtatctgccgatcaacagtttcctcggcgaaacggtggacggcattaaagagacgattaataatctgcttttgtacgacattgatttgggcagaaacacaatcaccatttctgaagttaatgaagaagaatgggcgacagcttggaaaaagtattatcatcctgtgaaaatttctgaaaagttcacgatcgttcccacttgggaaacgtacacacctgttcatacagatgaactgattatcgaaatggatccgggtatggcattcggtacgggaacgcatccgacaacggttctgtgcattcaggcgcttgagcgtatcgttcaaaaaggcgaccgtataattgatgtcggcaccggttcaggaattttaagcatcgcggccgccatgcttgaggccgagtcggttcatgcgtatgaccttgatccggtcgctgttgaaagtgcgcgtctgaatgtgaaattgaacaaagtgagtgatacggccgaagtgaagcagaacaatttgttagacggcatcacgggcgaacatgatgtcattgtcgcaaatattttggcggaagtgattctccgctttacatcacaggcgtacgacctgctcaaagacggaggccattttattacttcaggcattatcggccagaaaaaacaggaagtaaaagaagcgttggaaaaagccggctttaccatcatagaaattctgtctatggaagattgggtcagcatcatcgcgaaaaaataacagttagtaggtgtcacagcgtatgcaacgatattttatcgagctcacgaagcaggagatggacgaaactcccgattttcaaatcacgggggaagacgtccaccatatagcgaacgtcatgagaatgagtgcgggcggccggattatctgctgttcgaaagacggccatgaagcgttatgcctgctaaaagaggtttctaaagatcatatatcatgcagcattgctgaatggacgggtgaaaaccgtgaactgcctttgaagatcaggatcgcaagcggcctcccgaaaggcgataagcttgaatggattatccaaaaagggaccgagctgggggcaagtatgttcatcccttttcaaggcgccagatccgtcgttaagctagacgacaaaaaggcaaagaaaaagcgggagagatgggcgaaaatcgcgaaggaagcggcggagcaatcgtaccgcaatgaaattcccgaagtgaaaaccgttcatacgttccggcagctgcttgaaatggcggagaatgtcgataaatgtgtcgttgcatacgaggagtcatcaaagcagggagaaacgggcgctttcgctgcggagctcaaaagccttccgcaaggttcgtctcttttaatcgtattcggccctgaaggcggtctgactgagtctgaagttcatcagctttcagaaaaaggcgccgtcttatgcggcctcggaccgagaattttacggactgaaactgcgcctctttacgcgttaagcgcagtttcctatcatacagagttattaagaggtgatcagtaatggcaactgttgcttttcatacccttggctgcaaggtcaaccattatgaaacagaagcaatctggcagctgtttaaagatgcgggttatgaacgaaaagaattcgaacagacagcagatgtatatgtcattaatacatgtacggtaacaaacacgggagataaaaaaagccgtcaagtcatcagacgggcgatccgccaaaatcctgacggcgtcatctgcgtaacagggtgctatgcgcaaacctctccggcagaaattatggccatcccgggtgttgacatcgtcgtcggcacgcaggatcgtgaaaaaatgctcggttacattgagcagtacagggaagagcgccagccgatcaacggcgtcggcaatattatgaaagcacgcgtgtttgaagagctggatgttcccgcttttactgaccgcacaagagcgtcgttaaaaatccaagagggctgcaacaacttctgtacgttctgcattatcccttgggcgcgcggcctgcttcgttcccgcgatccggaagaagtcattaaacaggcgcagcagctggtggatgccggctataaagaaatcgtcctgacggggattcatacgggcggctacggcgaagatatgaaagattataatttcgccaagcttctccgcgagcttgatacacgtgtagaaggattgaagcggatcagaatttcatctattgaagcaagccaaatcactgatgaagtgattgaagtgctggatgcgtctgataaaatcgtccgtcaccttcatatcccgattcagtcaggatcaaacaccgttctgaaacggatgagacgcaaatatacgatggaatttttcgcggaccgtttaaataagctgaaagaagcgctgccgggtctggccgtcacatctgatgtcatcgtcggtttcccgggagaaacggaagaagaatttatggaaacataccggttcattaaagaacataagttttcagagcttcacgtattcccttacagcaaacgcaccggaacacctgcagccagaatggaagaccaggttgacgagaacgtgaaaaacgaacgggtgcataagctgatcgcgctgtctgaccagcttgcaaaagaatacgcctccgattatgaaggagaggttctggaaatcattccggaagaggcgtttaaagagtctgatgaggagggcatgttcgtcggctatacggacaattacatgaaagtcgtcttcaaaggcacggaagatgtaatcggcaaacttgtcaaagtcaaaattcaaaaagcgggctatccgtataacgaaggacaattcgtccgcgtcgttgaggatgaaatgacccgaaacatgcgcatgtcttcataactgataaaaaaaccggtgccttcccgcatcggtttttttacggtttcggaggaatcagcctgtcaatcagccggtaaaacaaatgtgtgaacggcagaaacaataaggcggtgactacgttaaataacaggctgaaatgcgcaatcatctgcgcgggatcatcagacaggcgctccgtaaaacctgctgatgcggacaggaagggaaatacgagcagcacgccgagaatattaaacacaacgtgagcaccggcggtctgtctggcggcataaccgcctgaaacagcagccatgacggccgtgacgcatgtcccgatattagatcccagaacgacgctgaccgcttgttcaatgccgatcaccccttcgttcataaaactcatcaaaatgccgatgcagacggagcttgaatgaatgattgccgtcaatatcataccgataaaaagagcggaccagctcgaatcattcacatgtcgcaatacctccgcccccgccttcatttctgtcagcggaacggcgagccggctgaagcatgtgatgcaaaaaaagatgatgccgagaccgaggaagcttatgccgatctgcctgaacggatatttacggaggaggataaacacaaggcctccgataaaaagcacccaaatgagcacatccatctttatggctaaaaactccgtcgtaaacgtggagccgacattcgtgccgagaatcatcggaatggtccgtttaaaagataaagcgcctgcgctgacaaagccgatgacaatgaccatgaaggctgagctgctctgaagaaaaccggtgaatacgatgcttatgagaaaagctttcaaagggtggtcggtaaataagagcaggctcttctcaatttttgaatacgttaaggcgatcaggccctgcctgagcaggctcattccgagtaaaaaaaccaggataagtgcggtaaagagaatcagtatcatcaaacgaaacacccctttccatcattatatagacaagcagccttattcatgacggaaaagtgagctcgcttagttgacctgactgatggcttatattataatgtcaaagtacatgtttatatatgtatctttttaaaggtagtcgattggtgtattcggagggagggaaagagaatgtcaaaaacggtcgttagaaaaaacgaatcgcttgaagatgctcttcgtcgcttcaaacgcagtgtatcaaagacaggtactttgcaagaagcaagaaagcgcgaattttatgaaaaacctagcgtaaagcgcaagaaaaagtcagaagctgctagaaaacgcaaattctaaaagagggtggatttatgagtcttcttgagcgacttaaccaagatatgaagctgtatatgaaaagccgtgagaaagacaaactgactgtcgttcgaatggtgaaagcttcacttcaaaacgaagcaattaagcttaagaaagacagtttgaccgaggatgaggaacttactgtcctatctcgtgaacttaagcaacgtaaagactccctccatgaattttcaaacgctaatcgtttagatttagtagataaagttcaaaaagagctggacattttagaagtttatttaccgaagcagctttctgaagaagagctgcagacaatcgtaaatgaaaccatcgctgaagtcggtgcgagctccaaagcggacatgggcaaagtgatgagtgctattatgcctaaagtaaaaggtaaagctgacggcagcgtaattaacagacttgtcagcagtcaattatcttaattgacaaaaaagacatctttccttgagagatgtctttttttatacataaaaaaatgaaactaaagtacatttgttacgtatataaagaagaacgaaatgggaaggagggtatatttgccttgttccgaaaaaaaaacggaattgctgttgctctattgggcttatttgtattatctttattaggggttcaattgaacgcgaaagctgatcacccatcggtttatgtcatcccggttgagaaaaatgtcgaacaggggctcgcctcgtttttatcgcgttctttcaaagaagcgaaggagtccggcgcgtcacacattattcttgacatcaatacaccgggaggcgccgttcaatcagccttggatattgcggatatcatcggccgcgcggatgtgcctgttaccgcttacgttaataaacgggcgctttctgccggagcgtatatagcgcttcaggcagatgaaatctatatggcgccgggcggaaaaatgggtgccgcagccatcatcgacggaaagggaaacgcggcagacaaaaaggcccaatcactgtggcatgcagaaatggaggacgcagcggttaaaaacaaccgaaatccgaaatacgccctagccatggcagatcccgccattaatgcaaaggaagcgggcgccccaaagggaaaactgctgacactgacagctgaaaaagccaaggaagtcggatattcggagggcacggtttcagaccttgatgctttatatacaaagctcggttttgacaaagcggatgttcaccatgcaaaagaaggtttcatcggcaaactgggcagatggctgacaaatccgtttgttgtccccgtcttattaacgcttgctttgcttggtttgaccattgaattgttctcgccgggcctcgggataccgggtgccgtcggactgacggccatgctgctgtttttcacggggcatatcgctgccggattcgccggctatgacagcgtattcttattttgcgcgggcttggtttttatccttttagagatatttctgcccggaggcataatcggtcttatcggtattgcaggcgtcatcgcgagcctctttctcgctgcgggcagctttaccgtcatggcggtttctctcttgatcgccattgctgtgtctattacagcctttatcatattaacaagggtgttggggaaacgaatgaaattctttaaaaaattaatattaactgattcaacaagcacggagagcggttatgtttcaaatcagaaccggacggagctgttgggaaaagtcggcgttaccgctacagccctcagaccgtcaggcaccgtcattattgatgatgaacgtctggatgtcgtctcggaaggatcattcactgaaaaagacagacaggtgaaagtagtgaaagcggaaggctcacgcattgtcgtgagagaaatatagatgataaccttgaggaggaattagatggaactgtcaagtttggcgattttagcattagttgctgctgccattattgtgttagccatattcttcacctttgtaccggtgatgctatggatttcggcgcttgcggcaggagtcagaatcagcattttcactttggtcgggatgaggctgcggcgcgtcataccaagccgcgttgtcaatccgttaattaaagcgcacaaagccggcctatccgcaacaacaaatcagctcgaaagccattatctggccggaggtaatgtcgacagggtggtcaatgccctgattgcggcacagcgcgccaatattgagctgtcatttgaacgctgcgcagccattgacctggccgggcgtgacgtattggaagccgtacagatgagcgttaatccgaaggtcattgaaacaccgtttatcgcgggtgtcgccatggacggaattgaagtaaaagcaaaagccagaatcacggttagagccaatattgagcgccttgtcggaggagcgggagaagagacggttgtcgcccgtgtcggagaagggattgtctcgacaatcggttcttcacacaatcataaaaaagtgcttgaaaaccctgatatgatttcgcagaccgtacttggcaaagggctggattcaggcaccgcatttgaaattctttcgattgacatcgccgacgtggatatcggcaaaaacatcggagcgattcttcagacggatcaggcagaagcagacaaaaacattgcgcaggccaaagccgaagagcgccgcgccatggcggtcgcccaagagcaggaaatgcgcgctcgcgtagaagaaatgcgtgcaaaagtcgtggaagcagaagccgaagtgccgcttgcgatggcagaagcgttgcgtgaaggaaacatcggcgtcatggactatatgaacataaaaaatatcgacgcggatacggacatgagggattctatcggcaagctgacgaatgaccagcaagatgaagaccaacaataacctctctattaaggagggagccgctatatgcacgagattctgacaaatccgctcgtcattgccgccgtcatcggcattatatcggcaatattcggcaagaaaaacaaagatgaaaaacgtccgccgggtacacgtcccggaaatcaggcaaaaaagcaggatcaaaaacagccgcagaaagagcataagccggaagcggaagaattgcctgccgtttcagaagagaacccttttgagcaaaaaagaagggaagctgaaaagcgcctagcggagacggagcagatgtttaacgggctcgaacataagctgacatccgcacgcgcacgaaacgcgtctctgaagaaatcagccctcaaaataaataaagaaactgcggtccaaggcattatattcagtgaggttttgggtccgccccgtgcaaaaaaaccgcaccggaccatgcggaacatcggtaaaaaataaagtgttagaaccccttttcaaatcatacatatgagatgaaagggggttctttttttatggggcaaagaaagaatcgtgtaaaggcatggctgacaagagcattggaaattcccccggacgttatgatggatctgcctcgtattacgatggtcggcagacttcatatctacatagagaatcacagaggcctcctgctgttcagtgaagaagaagtcaggctgatgctcaagcaggggcagtgtatcatatcaggaaaaaacttggtcattaaggcaatccttcctgaggaaatccttttggaaggcacgatagatcacgtacgatatgtcgattcataaagccgggggggaataatgtgaaaaacaaatggctgtcatttttttcgggtaaagtccaaatggaagtcaaaggaaaagggattgaacggctgctgaatgaatgcacgagaaacggaatcgccatctttgcggtgaaaaaaaagcaagactgtgttctgctgatgattcagcttcaagatgtacatgctttcagaagagtcatcagaaaacatgaatgcaaagcaagctttacaaaaagaaagggtcttccctttctgcttctcaaatcaaaattaaatctgggcttcactgcgggatttgtgatattttttgttatattgtttcttttgtccaacatgatttgggaaattgatattaaaggggccaagccagaaaccgagcatcagatggtaaagcaccttgaagaaatcggtgtgaaaaaaggccgtttgcaatttttaatgatgacgccggaaaaaattcaaaaatcattaacaaacggcatcgataatattacgtgggtcggtgtggaattgaacgggacagcccttcatatgaaagtggtcgaaaagaacgaaccgacaaaagaaaagtacgtgagcccccgccatatcgttgccaaaaagaaggcggtcatcaaaaggatgttcgtgcaaaaggggcagccgatggcttttgtgaacgatcatgttgacaaaggacagctcctcgtctcaggactgatcggaaatgaagaccggaaagtcgcctcaaaagcggaaatttacggagaaacatggtacaagtcagaagtaaccgtgccccttgaaacatcatttacgctatatacgggtaaagtaaggacgaagcacaagctgtctttcggatcatggggcgtgcctttttggggcttcgggtttaatgaggagccgctgaaacatccgaaaacagaggaagaaaagcatccgtttcaatttctggggatgaagcttccggtttcttacgtttcagaacagacaagagaaagtgaaacatccgtgcggacttatacgaaaggcgaagcggttcaggccggtatcaaaatgggaagacaagatgtagaaaagcgattaaacggcagcggagaggtggaaagtgaaaaagttttgcaccaatccgttgagaatggtaaagtaaagttgattattctctaccaagttatagaagatatcgttcaaaccacacctattgttcagggagactaaagaatggcagaacatttacttgcgattaatcacaaactgaaaagcccggacgaagcactttctttgttcggcagccaagatgcttttttacatttaatggagagggatctgggcattagcctcatcacacgcggtgaaaccatttacgtttccgggaatgatgaaacatttgagatcgctgacagattattgggctcgctccttactttaattcgcaaggggatcgagatttcggaacgtgatgtgctgtatgccgtgaaaatggcaaaaaaagatgaactggactattttgaaagcatgtatgaagaggaaataacgaaaacggcaaaaggcaaaccgatccgtgtcaaaaccatcggccaaagagaatatgtggcggcgatgaagaaaaacgacatggtgttcggcatcgggccggcgggaaccggcaaaacttatttggcggtcgtaaaagcggtgcatgctttaaaaaacggccacattaaaaaaatcattttaacaagacccgctgtggaagccggcgagagcctcggttttctgcccggagatttaaaggaaaaagtagatccttatctgcgcccgctgtatgatgcgctccatgatgtgctcggaagcgaccatacggagcgtcttatggaaagaggggttatcgaaatcgccccgcttgcctatatgagagggcggacgcttgacgacgcgtatgtgattcttgatgaagcccagaataccactcccgctcaaatgaaaatgtttttgacgagattgggttttggctctaaaatgatcattacgggcgacgtaagccaaattgacctgccgaaaggcgtcacatcgggacttgcagtagcgaaggacatgctgaaggacgtaaacggcatctccgtgattgaacttgaccagacagatgtggtcaggcatccgcttgttgcaaaaattattgaagcttatgataagcaaaagtaatgcaaaaatgacccgatctcccgttatcgggtcatttttatatgatgtgttcctgatgtttcagggaggaggttcttgttttgaaaaagaagggaaagggcaaaagcgcccgggaacggttccgcagtttcagacatgcccgctcagcccatgtgctgctgtacctgctgctttcagcgatcatgtttggtttgctctttattcatgtaaaacctgaatcacttaatttggatttgtttgcagtcagtgataagacgatttacgcgcccgccacagtggaagatcagcaggcgacggaatcgaaaaaacaggcggccgaagatgcggtggaagatcaatacactctgaaaaaaggctataccgacaatcggcttgacctgattacttccatttttgacagcatcggcgaagtgaaaaaagatgcggaaaaagacaaaaagtcaccttcggaaaaatcactggtaaaatcggtgaaaaacaagctgacacaggatgtcaatgaatctgtctcggaagatgccattaaatcgcttctccatgcaaacaatgaagatttctcatttgtgagggattccgtcattaccgcggtgaatacggtgatgagcagtgaaattccttctgaaaagcttgctgaagcgaaggataaggtcgcaaaagagctgaaaagcgcttctgtgccgtcaaaatatttagcggctgcgactgaaatcggaaaatacgcggtcatcccgaattacgtttttgatccgaaagcgaccgatgaaaaacgccaggaagcgtcagacagcgtccagccggtacagatcaaacagggacaggttctcgtggaagagaatgacctgattgaccgggaagtatacaggaagcttgaactgacgggtcttttgaataattccaacctgttaaaaccgatcagcggtctccttctgatgatcggcctgtttattgccacgcttgtctactattttgagaaacagcagcaggagcttaagctgaaaaataaatctcttttgctgttttctatcattacaacgcttattctcgtcattatggaagtcgtcagtctctttcagaagattgaatacaccaatatcggctatcttgtgccgatcgccgccggcgcgattttaatcaggctgctgctcaatgaaaggctcgccattttaggaagcatcattctggcgatctgcggcagtatgatgtttaatcagggtgtgacgggaacatttaattacgtcatcggcatttactatttaatcagcagcatttcaggcattctgtttttgggaaaacataatgcgagatcaaaaatattgcagacgggactgttcgtctcatttattaatatgattatcgtgctgtcgcttttattaatacaaaatacggcgctgtcaccggttgaaatcggaacgctgatgctgatgggggtcgtctcgggacttgcttcatccgttttgattatcggtctgatgccgttttttgagacgggattcggcattctttcaacaatgaggctgattgaactgtctaatccgaatcatcccctgcttcgaaagattttaacggaaacacccggtacatatcatcacagcgtcatggtggcaaatctgtcggaagcggcttgtgaagccgtaggggcaaacggtcttttagcacgggtcggagcgtattatcacgatctcggcaaaacgaaacgtccgcaatattttattgaaaatcagatgaatatggataatccgcatgacaagctgtctcctcagctcagcaaaaatatcattattgcacatacgacagacggtgcgaatatgctcagaagctataagtttccgaaagagcttgtggatatcgcggagcagcatcacggaacgtcccttttaaaattcttttattataaagcgaaagaaaagggcgaccagattacagagaaagagttccgctacccggggccgaagccgcaatcgaaagaagcggctattatctcagtggccgacagcgttgaagccgccgtccgttccatgcataatcccaatcccgagcggatcgaaaaactggtgcggggaattatatccgataagcttcaggacggacaattctcagaatgtgatctcacgttccgagaactggatacgatcgcaaaaacactatgtgcgactttaaaaggaattttccactcccggattgaatatccggaggctacgaagaaggtgaaataaatgagtttactcatagatattgttgatgaaacgaacagcgtctcagctgatgcgctccaagaagtggagaagctgctccaattcgcggcggaaaaagaaggcattcaggaccaggctgaagtatcggtcacgattgtgacaaatgaggaaatcagagaaatcaacagagactaccggggaaaagacactccgactgacgtcatttcgtttgcgcttgaagaagaaggcgaagacgaggttgaaatcataggcgccgacatgccgcctgttttaggagatattatcatcagcgcagacagaacgaaagagcaggcggaagagtacggccattcgtttatgagagagctcggttttctggccgtgcacggctttttgcatttgcttggctatgatcacatgacaaaagaagaagaggaagaaatgttttcaaagcaaaaggatttgctggatgagtatggactcacgagatcataaaaacgagtggagcaggttcctgaagagctttgtccatgcatggaggggaatctggaaaacggcgcggtcagagcggaattttcaatttcatattaccgcggcctgcgccgttatcgtttgcggttttctcaccgggctgagcacagccgaatgggccgttgttttggtgctgatcggagggatgcttgctttggagcttttaaatacggcgatagagcatgttgtggatttagttaccgatcagtatcacccgctcgcaaaagcggcaaaggacgcggccgccggagccgtttgcgtctttgccgtgatatcgtgtatcattggtttactcatcttcttgccgaagatatgttagcagaagattcttacaattattttacattgccaaaaatgggcgtgaaaaaccaatcataattatgtaaaataaaagtgacagcggtatcatacaggataaaggtaagagaggaattaagtacacatgaacagacaagaattgattgcagaagcattaaaagcgcgggacacagcgtatgtgccgtattcaaatttcagagtgggagccgctcttcttaccaaagacggaaaagtgtacagaggctgcaacatcgaaaatgcggcatacagcatgtgcaactgtgctgaacgcacggcgatattcaaagctgtttccgagggggatacggaatttgcgatgctcgccgtggctgcggatactccgggaccggtttcgccgtgcggagcctgcagacaagtaatttccgagctgtgctcaaaggatatgcttgttattctgaccaacttacaaggacaaataaaagaaatgactgcggaagaattattaccgggcgcattttcatcggaggatttacatgacgaacgaaagctttaaatcaggatttgtatctatcatcggaaggccgaatgtaggaaagtctacctttttaaacagggtcatcggtcaaaagatcgccatcatgagcgacaaaccccagacgacaagaaataaagtccaaggggtgctgacaaccggcacgtcgcagaccatttttattgatacaccgggcattcacaaaccaaagcacaagcttggcgactttatgatgaaagtggcgcagaatacgctgaaagaagttgacttggtgttatttatgattaacgccgaagaagggtacggaaaaggagacgagtttatcattgaaaagctcggacagacgtctacaccggtctttctgatcgtaaacaaaattgataagatccaccctgaccagctgcttcttttaattgatgagtaccgtacgcgctatccgtttaaagaaatcgtgccgatctcagctttggaagggaacaacgtcgaaacccttctcgcgcagattgaagcgtatttaccggaagggcctcagttctatccgagcgatcaggtgactgaccaccccgagcggttcattatttctgaactgatcagagaaaaggtgctccatctgacaagggaagaagtgccgcacagcatcgctgtcgctatcgagtccattaaagggcaggaaaacggctccgtccatgtcgctgccaccattgtggtcgagcgggattctcaaaaaggcatcgtcatcggcaaaaaaggagcgcttctgaaagaagtcggcaaaagagcgcgggctgatattgaagctcttttgggctcacgcgtttacctggaattatgggtgaaggtgcagaaggactggcggaataaaatgtctcagctgcgtgatttcggcttcaaagaggatgaatattaattcatctaaggcgcatgcctgaggtgtgagattacctcacagaagcagggattcgttagcaaaatttgtttaacatgaaaaggaggacatcaggtcaagataagggtaagaatttggatttgcaagctagtttaatgatgaaaggtgggttttttgtgttgaattttacctggaacgtattttctcaaacaggaagtgttgatacgtaccttctttttaaagaactggaaaaagagaacctggaaagacccgaagaaccggaagatgagctagcccgaattgattttccaattttgtaaacctcttggcccctcccattgttggaaggtgcggaaatgctgactaaatgtgaaggaatcgtgctccgtacgaatgactacggggagacgaataaaatcgtgacattgctgacgagggaacacggcaaaatcggcgtcatggcaaggggcgccaggaagtcagccagccggctgtcagcagtcagccagccgtttttgtacgggtcatttttaatgcaaagaacatccggactcggcacgctccagcagggtgaaatgattctcagcatgagaacgatcagagaagatttatttttgacggcgtatgccgcttttatcgctgaactcactgacaaaggaacggaagagaagaaaccgaacccctatttattcgaattgattctcgaatcctttaagaggctgaatgacgggactgacccggacgtgatcaccttcatcgtgcagatgaaaatgctcggcgtcatggggctgtatccggagctgaatcattgtgtccactgcaaaagcggggaaggaacgtttcatttttcgataagagataacgggtttatctgccaccgctgctttgaaaaggatccgtacagagttccgatttcgccgcaaacggcaaggctgctaaggcttttttattactttgatatcggaaggctcggcagcgtctcgttaaaacaggaaaccaaaaacgaaattaaacgggtcattgatctgtattacgaggaatattcaggactttatttaaagtcaaaacggtttttagatcagatggaaagcatgaagaaccttttggatgaaaacaaaagttgacattctgcccatctttttatatgatcatttattataaaatatgttgcagtgacagaaagaagtacttgcgtccaactcatacaagcgaccttagggcagtgtaagctaaggatgagcgcgcaacgaaaggcattctcgagcaaccctttaaaaagaggctgagtgattcacatcctcagcaactagggtggaaccgcgggagaactctcgtccctatgtttgcggccggcaagcatagagacgggagttttttggttgccgccgcacttgtaaaagaatggagaaagtggaggtgcttgaaatgaacattcaagatatgattttaaccttgcagaagcactggtcgaatgaaggctgtgtgctcatgcagtcgtatgatgtggagaaaggcgcaggcacaatgagcccgtatacatttttacgaagcatcgggccggaaccgtggagagtggcttacgttgagccgtccagacggcctgcggacggacggtacggtgaaaacccgaacaggctctatcagcatcatcaattccaagtcattatcaagccgtcgcctgataacattcaagagctttaccttgattcattgcgtgcgctcggcattgacccgcttgaacatgatatccgtttcgtagaagacaactgggaaaacccgtctttaggctgtgcaggtctcggctgggaagtatggcttgacgggatggaaattactcagtttacatacttccagcaggtgggcggaattgaatgtaaaccggtatccgttgagatcacgtatggtattgaacgtctcgcgtcatatattcaggataaagaaaacgtctttgatcttgaatggacgtcaggatttactgtgaaagatttatttatgatggctgaatatgagcattccgtttatacttttgaaacatctgacgtggatatgcttttccatttgttcagcacctatgaaaaagaagcgatcagacaaatggataacgggctcgtgcatccggcctatgattatgtgctgaaatgctctcacacatttaatctgctcgatgcaaaaggcgcgatctcggtgacggagcggacgggttatatcggccgtgtccgcaacttagcgagaaaagtggcaaaaacgtattatgaagaacgggaaaaattagggttcccaatgcttaaagaggagggctcttcccatgagtaaacaagacttgcttttagagatcggactcgaggaaatgccggcgcggtttttacatgacagcatggtgcagctcggtgaaaagctgaccgactggctggctgaaaaaaatatcgcccatggcgaagtgaaactttttaatacgccgagacgtctggcagtatatataaaagacgtagcagaaaaacaggctgatattcaggaagaagcaaaaggccctgcgaaaaaaatcgctctggatgctgacggaaactggacaaaagccgctatcggattttcaaaaggccaaggcgccggagtggatgatctgtatataaaagatgtaaacggcacggaatatgtcttcgttcaaaaattccaggcgggacaagagacgaagacacttttaccgcagctggaaaatttgattgccggaatgcattttccgaaaaacatgcgctggggcacgcaggatctgcgctatatccgtccgatcaaatggattatcgctctctttgggaaagacgtcattccgtttgaaatcacaaatgtcgagacgggccggaacacgcagggacaccgctttctcggccaagaagtatctgttgatgcaccgtcatcatacgaaaagctgctgaaagaacaaagcgtcattgctgacccgaaagaacgcaaacaaatgatccaaagccagctggacgcgcttgcggccgagaagaaatggaacattccgatcgatgaggacctgctgaacgaagtcaaccatctggtggaatacccgacggcgctttacggatcttttgaatccgagtttctttctatccctgaagaagtacttgtaacaacaatgaaagagcatcagcgctacttcccggtaaaagatgaaaacgggaatctgctgcctcattttattacggtaagaaacgggaacagccatgcaattgaaaatgttgcccgcggaaacgagaaagtgctgagagcaaggctttcagatgctgcgttcttctacaaagaagaccaaaagctgaacattgatgaaaacgtgaagaaactggaaaatatcgttttccatgaagagctcggctcccttgaagataaagtaagaagagcggccgccattgcgggcaaacttgccgtccgcctgaaagcggatgaacagacgcaaaaccttgtgaagcgcgccgcagagatttctaaatttgacctggttacacatatgatctatgagttccctgagcttcagggcgtaatgggagaaaaatatgcgcgcatgctcggtgaagatgatgccgtcgctgccgctgtcaatgagcactatatgccgagagcggccgggggagaagtgccttcaacctttaccggcgcggtcgtggcgttagctgataaactggacacgattgcttccttcttcagcattgacgtaattccgacaggttctcaggatccgtacggattgcgccgtcaggcaagcggcatcgtttccattctgatcgaccgcaattggggcatttcgtttaaagagctgctgtcattgacagaaacggaaaaagaaaatgagctcctcgatttctttacacagcgtctgaaatacgtcttaaacgctgaagacatccgtcatgacgttattgaagccgttctggacagcacagagcttgagccgtatgcagccgttcataaggcaagagtgcttgagaagcacctcggcacacccggctttaaagaaacggctgaatcactcggccgggtcatctccatcagcaaaaaaggcgagagccgcgatgtcaagccggatctgtttgaaaatgaacaggagaaaaagctgtatgacgcttatcaaaaaacaaaagacagtgtcgcggaaagctttgcctccaaaaactatgaacaggcgcttgccgtgctcagcggattaaaggagccgattgaagactactttaatcacacgatggtaaatgcggacgatgaagcattaaaaaccaaccgtttagcgcaaatgaccgctcttgcagatgtgatcaagtcttttgctaatatgaatcatcttattgtaaaataaagaaaaagacggttgctgtgtgatcggcaatcgtcttttccccttttacataaacatcacagaatgaaaacatagataaagaaacccttccataaaggtggtgagtacgatcgaattaaataaacggcaagaacaaattttacagattgtaaaggaaaacggcccgattaccggagagcatatcgcagaacagctcaatttaacgagggccacgctgcggccggacttggccatactcaccatgtcaggcttcttagaggcccgtccgcgggtcggttatttttatacggggaaaacgggaaatcagctgcttgcggataaattgaaaaagctgcaagtgaaagattttcaatcgatccctgttgtcatcaatgagaatgtctcggtatacgatgccatctgcaccatgtttttagaagatgtcggcacgttatttgtcgtagatcgtgatgctgtcttagtcggtgtgctgtcacgcaaagatttgctgcgggcgagcatcggccagcaggaacttgcctcaataccggttcatattatcatgacaagaatgccgaatatcgccgtctgccggcgtgacgattatgtgatggacatcgccaagtatttaattgaaaaacagatcgatgccctgcccgttattaaagatacggataaaggctttgaggtcatcggccggtttaccaaaacgaatatgactaagatacttgtcagtttatcagaaaatgaaatcatataagcttgaaaactaacggggggataacatggacaatcgcatcatttatgtagtatcagactcagtcggagaaaccgccgaactcgttgtaaaagcctcgctcagccagtttaacggctcagccgatgatacgcatatcagaagaataccttatgtggaagatatcggcaccattaatgaagtcgtgtctctcgccaaagcggacggcggcattatttgttttacgctcgttgttcctgaaatgcgcaaatacctggttgaacaagcggaaaaagcgaatgtgctgtattacgatattatcggtccgctcatcgataaaatggaatcggcttacggtctgaccgctaaatatgaaccgggccgcgtccgccagcttgatgaagattatttcaaaaaggtcgaggcgatcgagtttgccgtcaaatatgacgatggcagagatccaagaggcattttaaaagccgatatcatcctgctcggagtatccagaacgtctaaaaccccattatcacaatatcttgcccataagcgtctgaaagtggccaatgtgccgatcgttcctgaggtcgatccgccggaagaactgttcagcgttgatccgaaaaaatgcatcggcttaaaaatcagccctgataaactgaaccatatacgaaaagaacggttaaaatctctcggcttaaatgacaaagccatttacgccaatatcaacagaattaaagaagagctggagtattttgagaaaatcgtggaccggatcggctgccaagtcgttgacgtttcgaataaagcggtcgaggaaacagcgaacatcattcatcatctcaaaacaaagggccgataactcaggacgctttatcctgggtttttgggtatgcaaatagggaataaacaaaaaggatggcatctttgcgaagtttgtattataataaaaaattgtgataaaatgtttatttttaggtttaagcttcgtgtgatacgaataaactattatgggtaagatgtcaagaataactcccggaaatttttcgacaaagctcaaaatagatccgcagtcatggagcatatgcgatttcgcttgtttttatgcaggagattgatggagggatggagaattagtcttctaaatgaaaaagaaaagacgatttttgtcgatgcagacgcatgccccgtaaaagaggaaataatgctcattgcatcgcaatacagcgttcgggttattttcgtcgcatcatttgaacactaccagctttccagaagcaaagacgagaactgggtatacgttgatcctcataaagaagcggcagacttatatatcgcaaactatgtgagatcgggagacgtcgtagtcacgcaggatatcggtttagcctctcttttgctgaacagaaatattgccgtcttatcggaaaggggccgttcttatactgaagacacgattgacttcgctctgatgagccgtcatatgtcaggcaaaatgagaagaagcggcattcattccaaaggacctaaaaaattaaataaagaagatcggaatcgatttgttaccctgcttaaaaaaatcctgtcgaatgatgaagggatttcaaatcaaaacatcgaataatgtacgacggagtgttataagatgggaaaccgcataccagatgaagtagttaatcaggtgcagcagtcagcagacattgttgaagtcataggtgattatgtccaattgaaaaagcaaggccgcaactactttgggctctgtccgtttcacggggaaaacacgccctcgttttccgtctccagcgataagcagatctttcattgcttcggatgcggtgcgggcgggaacgttttctctttcttacggcagatggaaggttattcatttacggaagctgtttctcaccttgcggataaatatcagattgatttccctgatgatataacgattcactctgcatccaggccggaatcttccggagagcagaagatggcggaagcccacgagcttctgaagaaattttaccatcatttgctaataaatacaaaggaaggccaggaagcgttagattaccttttatcaaggggttttacgaaagagctcatagatgagtttgaaatcggctacgcgctggattcctgggatttcatgacgaaattcttgaaaaagcgcggttttgaggaagaactgatggaaaaagcgggtctgctgatcagaagggaagacggcagcgggtattttgaccgtttcagaaacagaattatgtttcccattcatgatcaccacggagccgtggcggctttttcaggaagggcgctcggaagccagcagccgaaatatatgaacagcccggaaacgccgctgtttcataaatctaagctgctgtataactttcataaggcgcgcctgccgatcaggaaagaggagagagccgttctgtttgaaggcttcgctgacgtcatatccgccgtcagctcaggcgtaaaagaaagtatcgccacaatggggacgtcgctcaccgaagaacatgtgaaaatcctcaggagaaatgttcaggaggtcattctctgctacgattcggataaagccgggtacgaagctacgctgaaagcggccggcctgctccagaaagccgattgtaaggtaagagtaagcatgctgcctgacgggcttgatcctgatgattatatcagaacccggggcggagaaaaattccggaccgatatcattgatgcaagcgttacggtcatggcttttaaaatgcagtatttccgcaaagggaaaaacttatctgacgaaggagaccggctcgcttacatgaaagaagtgctgaaagaaatcagcgctctttccgggtcgcttgagcaggaaatgtatgtgaagcagctcgcctcagaattttctctttcggtagaatctttgactgaacagctttccatctacgccagacaaaacgcccccggcgacaaaaacgccgaaccgcagacaagacgggcccgggtgacgacaaaagcgaaacggcgccgtctccgtcccgcctatgagaacgcggaaagacttctgctcgctcatatgctgagagaccgaaacgtcataaagaaagtgattgagcgtgtcggctttgaatttaacattgacggacatcgtgcgctggcagcatacctgtacgctgtttatgaagagggcgctgacatgacgccgcagcatcttatggcgagaatgcaggatgaggaaatcagccagctgctttcagatatagggatgctccaagtaaacgaggagctctcagaggccgagttatccgattacgtaaaaaaagtgttggatcaccgaaaatggtcaatgataaaggaaaaagaagcagaaagagcggatgcggagaggcagaaagacttcgtgaaagctgcgtctctggctcaagaaattgttgcattgaaccgatcattaaagtaacaccacaaagaggcttgcgttctgattggcaatgattccttgcggaggagcaaatagatcgcttaacctcatcatgaattgtcatttattatccgcagccctgcatgctgaaaaagagagaaggcttccgggtcggataagaaacataccgcttttagaattcgttgcaagctttggaaggagggatccataatggctgataaacaaacccacgaaacagaaacagaacttacattagaccaggtaaaagagcagcttactgaaactggaaaaaaacgtggcgttttaacatatgaagaaattgctgaacgcatgtccagctttgaaattgaatcagaccaaatggatgagtattatgaatttttaggagaacaaggtgttgaattaattagtgaaaatgaagaaacggaagatcctaatattcaacagcttgccaaagccgaagaagaatttgaccttaatgacctcagcgtaccgcctggcgtaaagatcaatgatccagtccgcatgtaccttaaggaaatcggacgggtaaatcttctttctgctaaagaagaaatcacctacgctcaaaaaattgaagagggtgacgaggaatctaaacgcagactggctgaagcaaaccttcgtttagttgtcagcattgctaaacggtatgtcggccgcggcatgcttttcttagacttgatccaagaaggaaacatgggtctcatgaaagccgtcgagaagtttgactaccgtaaaggatataaattcagtacgtatgcgacttggtggatcagacaggcgattacacgcgccatcgctgaccaggcgagaacaatccgtatcccggttcacatggtggaaaccatcaacaaattaatccgggtgcagcgtcagcttcttcaggatcttggcagagagccgacaccggaagagattgctgaagacatggatcttacgcctgaaaaagtccgtgaaatattaaaaattgctcaagagcctgtttctttagaaacgccgatcggtgaagaggacgactcacatctcggtgatttcatcgaagaccaggaagcgacatctccgtcggatcatgcggcatatgagcttttaaaagaacagctggaagatgtgctggatacgttgacagatcgtgaagaaaacgtgctgcgtctccgtttcggtctggatgacggacgcacaagaactttggaagaagtaggcaaagtgtttggagtaacgagagagcgtattcgccaaattgaagcaaaagcgcttcgcaaattgagacatccgagcagaagcaaacgtctgaaggattttctcgaatagaatggaacgggtctttttgatccgttcttttttatgtataagatatatggataatatacctttattttactggataagcatatgttttgcaaatgagtttggaaaaaatgcggcatgtcctgaaagggggaaaatgagataagtttatttatattctttattgtaagcgtatacaattcattatacaatagaataaagataattttgtgataaacaaaacagttatttttgctttttgtataaattgtgaaatcaatgaaattgctgagcaagaccatttactttttgtaaaaataagttagaattagaagtgtttacatagggggagaatgaaaaagggggatggagatatgaagtggaatccgctgattccttttttgctcattgcagtgctgggaatagggctgactttctttttagctgtaaaaggcaatggagatgcgcatcagatcgcaagcggcggtgaaagcaaaaatgccgagaaggaaactgcaaacgcttcacctgaagagatttataaagcgaactgcatcacctgtcacggggaaaactatgaaggtgtatcagggccgaacttaaaaggcgtcggcaaaagaaaagatgtcgctgagattaaaacaaaaattgaaaaaggcggcaacgggatgcccgcgggccttgtgccggccgaaaagctggatgacatggcaaaatgggtttctgacattaaataaagctttaccggtccctatataaaagacatatgaaaaactctatccgccgcttggattccgggcggtttttttatatgatagtaaaggaaaaagaacctgagaaaagttgtgatattgtgaatgaaatgaagttatctaaaagattgcagtctgtggcggaatatatccctccgggtgccctggttgctgatatcgggtcggaccacgcgtatcttccttgctatgccgttttgaatcatttggcaagccgggcaatcgccggtgaaattacagacggaccgtttctatccgccaaacagcaggtggaaaaactggacttaagcactcttatctccgtaaggaaaggtgacgggctgagcgtccttgaaaaaggagaagccggcgccattacaatcgctggcatgggcggagcgctgatcgctcatattttggagtccggaaaaacgaaattgacggggcgtgaacggctgattctgcagccgaatattcatgccgttcatataagagagtggctgtatcaggaaggctatgaactgattgatgaagtgattctcgaagaagacggaaagtgttatgaaatcctcgttgcggaaactggcgaccgtgatgcgccgtatcgggacgtgccgatggctgccggaatgcttgcgggtccgtttttattaaaagagaggaatgaagtgtttcttcggaaatggagccaggaacttaagcatactgaacaaatttatgaacagatcagccgcagcgcaaagcatgaaagtcatgaaaaattagctgaattgaaagagcggatttctctgctgaaggaggtaatcggacatgcctaaacatgtaaacggacaggaaatcatccagctgtttgaacaattttcaccgaaggcttttgcggtggaaggagataaaatcggcctgcagatcggtacattgaataagccggtgaaaaatgtcatggtgacactggatgttctggaacaaacggtagatgaagccattgagaaaaaagttgacttaattatcgcccaccatccgccgatttttcggccgcttaaacagatcaccactgatcagcctggcggaagactgattgagaaatgtataaagcatgatattgccgtatatgcggctcatacgaatcttgatgtggcggacggcggtgtgaatgatctgcttgccgaagctctcggcctgacagacacagaagtgcttgtcccgacatattcggacccgatgaaaaagcttgccgtctatgttccgaaagactatgaagaagctgtaagaaccgcacttggcaacgccggagcgggacatatcggcaattacagccattgcgcgttctcctctgagggaatcggcagctttaagccgctggacggggcagaaccgtttatcggacagacgggagaactggagctcgtccatgaagtgagacttgagaccgtttttccggcaagtatggagaaaaccgtcgtaaaagcgctgaaaaaaagccatccgtatgaagaggtggcatatgatatttatccggtggagcagtctccgcttgaaaaaggactcggccgcatcggaaaacttcagcaagacatgacgcttgaagagtttgctctgtttgtgaaagaaaagtttgacgttaacggagtccggatggtcggagagcgaaacagcaaggtgaaaaaagtcgcggttcttggcggtgacggaaataaatatatttatcaggcaaagcggaaaggtgcagatgtttacgtgacgggcgatctttatttccatgtagcgcatgatgcgatgatgatgggattaaacgttgtggatccggggcattatgctgaaaagatcatgagaaaaggcacggctgagaagcttacggcaatggcaggagagaaaaactatgatgtgcgcattttcgcttccgaaacagatacaaacccatttaccttcttataaaaaaactgaggccccgggcctcagtcttttatttttactttcggaaggatttttttaagcggcacactgtgttcaagctgccatgtcgattcatcgttgtggtcaaactgctctaaaaagcggatgacttcctttgtaatcggtgtcggtgttgatgcgcctgcggtaacggcgacggtattgacgtctttcagccattcgagcttcagttcactgatgtctccgattcggtaggcttttgttccggcgatttcttctgacacttgcgccagtctgttggagttattgcttttcggatcaccgacaacaatggttaagtccgctttttttgcctgctctgatacagcttcttgacgaacctgtgtggccaggcagatttcctgatggtattccacgtacgggtacttttctttgactgattccataatatcgtggacgtcccactgggacattgtcgtttggtttgtaacgattaatttctcagcctgaatatcgagatttctcacgtcttcctctgtttcaacgagatgaacgatttcaggagcgacgccgacagctccttcaggctcggggtggccttttttaccgatgtatatgacgtgataaccttcagcttttactttccggattaagtcatgtgttttcgtgacgtccgggcatgtggcgtcaatcgtaacaagccctttttcctcagcggcttttcttacttccggagataccccgtgagccgtgaaaataacggttcctttttccacctgctttaaaatctccagacggtttgtgccgtcaagcgtgtaaatgccgtcttcctcaaacgcatctgtgacatgcttattatgaacaatcattccgagtatatatataggtcttggcagtgttttatcgagtgacgcgtttttggctatgaccatggcatcaacaacgccgtaacagtagccgcgcggcgatattttgataacgtccaatgtagatgtcctcctatcaaaagtgagtgtagaggcaatataaaaagccgtagttaaacggctcaaatcttgcattcttctgatctcattatagctaatctttcgtgagatatcaaagaatgttaaatatataatttcggctttgatctgcccgatgttctttttggacgcggctgttccgctgagtctgcctgtgcggcgtctttttcttttgaagcggatgctttttcagacgtcttctttgatgttttggatgaggcgtctgatttgttttcatcttctgtttcatctgttttttcagcttcatcctttttgtcctgttcgtctgtttctttcgtctcgtcagattcattctcgtcatcactgctgcttaattggctgtaaagcttcatcatggcgggcagactccgtactaaaggaccgtactgctggatcatcggcgtaacctgctgcgccacgccgagcaccttctgaacgttgccgagcatgttcgacagggatgccggacttgccaggttctgtattccctgcagtcctgcacctgctcctccgctggccgccgccggtgccgacgcggcagcgcttcctcctcctgaaccgggtaaaaaacgggaaagcataccttttaagccccctccgccgcccgtgcctgcgtttctcaggcccgctccggcaatctgctgctgagggaaaagctgccggccctgctgcattagctgccgtcccggcaatgacggtcttcctcccatcatcatacgcggattcataaacggccgtccctgctgcgccatatttctcatcggctgctgtggaaacatacttgtacctcctttctgtctctctgctattacaatatgcatcggagggggcatttgcttttctgtctcgaaaacaggattcccccaagacatggtgtttttaagtaaaatcggttataatgtgatgatggacacagaatgtgccgctttaaggagctgggaaaaatgaaagaaactaaatttgatggatacaacttaaaaccgtttattatagatgcagttcaccgccttggtttttatgaaccgacagatattcaaaagcgtctgatacctgccgtactgaaaaacgaaagcgtgatcgggcagtcccagacggggacggggaaaacccacgcctatttattgccaattttgaatcggattgatccgggttctgatacggtacaggctgttatcacggcgccgacgagagagcttgccaatcagattcatcaggaagcactcaaaatcacacagggtgcggaagatgagccgatccggacaaaatgcttcatcggcgggacggacaagcaaaaatcaattgataagctgaaaacacagcctcatctcgtcgtcggaacgccgggccggatcgcggatctgattaaggcgcaggcattgaacgtctataaagcgcagtctctcgtcattgacgaagctgatctgatgcttgacatgggctttttagaagacgttgattacatcggatcgcgtatgccggaagaacttcagatgcttgtgttctcagctacgattccggaaaagctgaagccgtttttgaaaaagtatatggaaaatccgaagtacgcgcatgttgagccgaaaagaatcacagccgaaaagattgaacatgttttggttccttctaaacagcgtgataaagacaaactgctttttgatatgatgtctcatctgaacccttatctgggcattgtgtttgcaaatacgaaaaacacggctgaccatattgcgaaatacctgactgaaaagggcatgaggatcggtcttctgcacgggggattaacgccgcgtgagcgtaagaaggtaatgaagcagattaatgatctggaattcacttatgtcattgcgacagaccttgcggcaagaggaattgacattaaaggcgtaagccacgtcatcaactatgagcttccggacgatctggatttttatgttcaccgcgtcgggagaaccgcacgcgcgggttcatcaggccaagcactgaccatttatgagctttctgacgaagatgcgctcgtaagactcgaaaagatgggtattgtgtttgactatgcggagcttgtaaacggcgaatggaagaaaggcgatgaccgccaccgccgcaaaaaacgcaaaaaatcggagaatgaggctgaccaaatggcgaagcgcctcgtgaaaaaaccgaaaaaagtgaagccgggctataaaaagaaaatgagctacgaaatggaaaagataaaaagaaagcagagaagaaacaaatctaacaaaggaaagtaggggaatcgggttgctgaaaataggttcacacgtctcaatgagcggaaaacatatgctccttgccgcaagcaaggaagctgtttcgtacggggcgaatacatttatgatctatacaggcgctccccaaaacacgcgccgcaaaaaaattgaagacttgaatatcgaagagggccgcgcccatatgaaggaaaacggcatcgatgagattgtcgtgcatgcgccgtacatcattaacattggaaatacgacaaatccggcaacatttgagctgggcgttgattttctgcgttctgaaattgaaagaacggcagcgatcggcgcgagacagatcgtgcttcatccaggggcgcatgtcggagccggggctgagacgggcatcaaaaaaatcattgaaggtttaaacgaagtgattgttcccgggcaaaacgtgcagattgcgctggagacaatggcgggcaaaggatcagaatgcgggagaagctttgaagagctggccgagatcattgcgggagtcacgcataatgaacatctatccgtctgctttgacacttgccacacccatgacgccgggtatgatgtcgctaatgattttgacggtgttcttaacgagtttgataaaatcgtcggcatcgatcggataaaagtccttcatgttaacgacagtaaaaatgtcaaaggcgcccggaaagaccgccatgaaaatatcgggttcggagagatcggttttgacgctctgcagtacatcgttcatcacgagcagcttgccgatatcccgaaaatcctcgaaacaccgtatgtaggcgaagacaagaaaaataagaagccgccgtaccgttttgaaatcgaaatgctgaaagaaaagcagtttgataaggagcttcttgaaaaaatatcagctcaataagaaagaaaggaggggcgggtgtccctccttttttaccctgagaattgattgaaaagttcgtcaactttccgcgccgtttcttttgaagttatcgtttccacttttttcagcaggcgcagccgctcctgttcatcaaaaatattgatgttttttccgtgcatcagagccgctacctcagccgcttgacttcttgtaatgctgatcccgtattgcttggaatatttcagcagatcgtccgcagtgacttgattgagccgctgcaaaataattctttgtattaaaatcatcgatactttcacctctttagacataatgtattgagcagatcattaaaatgttacagcttttaatggtaaaataaagttgcttactgtttaaaatagttattataggaaaggagattttatgaccccaaataaacagcataaaagagaatcatttttacactttatcttcagggtcattatgattctgatcggggcgggttcagccgccgtaagtattgaattgtttctggtccctaataattttatcgacggaggcattatcggtgtttcattaattttagaccacctctttatgtccaatcccctcctcaattttgccttattcgttgtgttactcaacattccatttatgattttcggatataaatatatcggaaaaacatttctcatctctactgttatcggaatcgtcggtttagcgctgattgaatcctcattgcaccatgtggaggccattacgacccagcctattttggcgacggtattcggggggcttttgctcggtttcggggtaggccttgtcatccgaaacggaggctcgatggacggtactgaaatcctcggtatccttctcacgaaaaagctgcccttttcagtcggggaattcgttatgctcatcaatgtgtttattttcatttgggccggttttgtgttcggtccggagcaggcaatgtattctttcatgacttattatattgccatgaaaacgattgacgcggtcatccaggggcttgatgaaacaaaagcggtcattattgttgcagagcaatatgctgagatctcagatgcaatattgcaccggcttggacggggaaccactaagcttcagggaaaaggcggatatacggatgaaaccaaagaagtcatttacgcggtcgtgacaaggcttgaagtgactaaattgaaatccattgtgtttgaaattgataaaaacgcctttattacaatcatgaatacccatgaaacgaggggcggtaagttcaaaaccgcgattcactaggctttcatttacttttcatcattttataggtataatttgatacatcataagaaaatggcctgctgttcagacagctgccattttctttttggagcgataccgtgttgtaaaggggaggtcctcatgaacgtacaagaagcgttgaacctgctgaaagaaaaagggtataaatatacgagtaagcgagaagacatgctgcagctttttgctgattctgataaatatctgaccgccaaaaacgtgcttgccgcattaaatgacgactatccgggtctgagctttgataccatatacagaaatctttcgttatatgaagaactcggcattttggaaacgacggagctttccggagaaaaactgttccgttttacatgctcttatacccatcatcatcaccattttatctgtttaacctgcgggaaaacgaaggaaattgagtcctgtccgatggataagctgcacgatgatttggaagggtatgaaatcagcggccataagtttgaaatttacggcacctgtccggcgtgccgataaaaaacctcctgcttatacaggaggttttttcagcttttgacatgctgaaagctatgtttgtttttattaatccaggcgacggcttcaagccaattctgcaccctgataatattggaatcgatggggagctgattatatggggagttaaaaaggataaccggaatgcctgcttcttttgcgatcattgtcgcattgccgtggtgatcttcgaaaaataaatcaatgccgtgttttttgacggcttccactttgtgatggcctccgacaagctcaatgtgatcgtaatgaatgtcccggtttgcaaaccagtccagcgtaacatcttctaagtggccgcgtcttgccgtaatgtagatcaggcggtgctcttctttcagtccgtccagtgcctgcttggcaaattccgcgagcttcgcttctttatatatggctgcttcatgaacgttcatccattcccaaaattcctcgtctgtaatgttcaaaagcttcgtcagatcataatcagtcatatcatccaaggtaatggaaagatgaaatgagcggtttaaataagggacaaatgtatcctgtgccgtaactgtgccgtcaatatctatacctaaccgtaacatgtccacactcctataaattcatcccttcaagtgtaacataaacaattaacaataccagaaaagtttagcaaacatgaattcgtaaaaaacgcggaaactaaaaaagctcctttcataaaagaaaaagggggaattgaaggtggcatacgattacgaaaatcgaaaaggcaacgactactacgtggatcatggatcggaaggaaccgatatcacgcgtgatgtttattcagaagaaacagcggccgaaatttcagagccatatcgtgcttctgaccgggcagcagaccgtgatgataatcgggacggagtaagtgaaggccgggggatagggtatgcagcattggctatttctatcatttccctgtttgtgctccctgttttattaggggcatgcggcattatcgtcggctatatcgccagaagaagaggagcaggcgctttaggcggatgggcgatgggaatcggtattgtttcccttgtgctcggcatcttcattacaccgtttttttaacacaacgcaaaaaaagcttggcggaatatccgtcaagctttttgtgtttcttgttctgcttttgctttttccgcttcaagctttgcgtagtgttcttctgccagcttgtcgatttcttttttcagctcttcgaccatggtttcttcagggactttgcggacgatttggcctttgcggaaaagaagtccttcgccgcgcgcgccggcaatcccgatatcagcttctcttgcttcgcccggtccgttaacggcacatccgagaacggctactttaatcggcgctttgactttagaaatgtattcttccacttcatttgcgatgctgatgagatcaatttcgatccgtccgcatgtcgggcatgaaataagcgtagccgcgtttgaagcgagaccgaatgatttcagcagttctctggctacttttacttcttcaaccgggtcggcgctcagagagatccggagcgtgtttccgattcctttgcttaaaatcgctccgagtccggccgcgctttttaccgttccggcaaacagcgtgcccgattctgtaattccgaggtggagcggataatcaaatgcttttgatgctttttcgtatgcttctatggctagattgacgtcagacgctttcatgctgacgatgatgtcgtgaaagtcaaggtcttccaggattttgatatgatgaagcgcactctcaaccattccgtcagcagtcggatagccgtatttttctaaaatgcgtttttccaaagaacccgcgtttacgccgatccggatcggaattcctttttctttcgctgcttttacgacggcttccactttttcgcggcggccgatgtttcccgggttgattctgattttgtcggccccgccctcaattgcttttaatgcaagcttgtagtcaaaatgaatatcgacaacgagagggatggaaatttgttttttgatgtcggcaatcgcgttagcggcgcgttcgtccggacatgccacccggacaatttggcagccggcttcggctaaacggttgatttccgcaactgttgcttctacgtcgtgtgttttggtcgtcgtcatactctgaatgacgacttcgttatttccgcctattgttaaaggtcccactttgacgggacgcgtttttgtacgatgtgtgatttcactcacttgtcaatcgctccttaattgtagttaccgcttttgcaggctgagccttttacatgtcaggcaacttctatttacatgttatattgtaacagtgtatttgccgaactgacaagaaattaacgtttaattgcggtagacggggaatttataagcggtgcctgcctgaattgcgtttgcttttacattcggattcagcgcttcaaaatcttgcgcaatatcatctggcgctttatgtgcgccgactatcgacatcaccgtatcgccttttttgaccgtaaccgttctgtatgaagattcctgtcgggctggctgtgctgccgctgcgtatgctggaaggtcttgagaagggatcgtgccgattttaagatcgtaaaagataatgaatatcacaaataaactgccgaatacaaaagtaagccgcttcattccaaccgcctcccgcatacatttttacttcattgtatgcttgtcccattttgttcatgacaaaaaagaagaccgccgggggcagtctttgttacacagctgtttttcttggcggtatctcttttaagacgaggaaaaggatgataaagtttacaaaccaattcactaaaaattcactcggcaccgtaataacaagcgcgcgcatgatcgtaaagaatatggtcgaaagtgtaatggaataagccgaaagcttccagagctgctggtaattcaatgtctttctttgcgcatttttcaatatcaggccgatgacggcgagaaatgatacttcaatgaattttccggccgctgtcatgatgaacagcaaaatggacaggacagtgacgatcattgttttattttggtttaatgctgatatgatttctttttttgtgatatcagctggcatcagcgaataattcatttctgtcgcctgtccgtctacagcaagcaccattttatttttcaaaatgccgatcgcattttgtttcgccgctatttgtttcgcgccgtaagcatctgtcggatcaaacacgatgacgaacccgttcgcttccgtttccttagaggcggatgctttcgtctgcaattctccgtttgaaatgctgaaatcagggaaatctttctttaacacggttttgaaaccgttcattgagtttacggtgcctgaggaaaggtaataagcgcttggcagcgtaaaaaggacagacagcaaaaatacataaaggatcgcttttcctatcccctgaaaacgtgtttttgcaatatccgccggagagtatgtacttttcaataaagccgtaaatatgttcaacatcttcacttcctagcctaaactggtatatgttgcttattgtatcgttcacaggggatgaacacaagtgagagtatttaaagcggtgataaggaatcatacataataagataaagcgggaagcggtgatcgcccgcaaaacaaaggagggtgtttttttcatgagtgttttgtattggctgattatcattgcggtcttcgtcattgcttttatcgggcttgtatatccggtgattccaagcgttatttttattgtggccggttttcttctctacggatttttgttttccttcagtccttattcttacctgttttggctcattgaggcggtatttgcggccgttttattcgcagctgactatgtgtcaaatttacttggcgttaaaaggtacggaggaagcagggcggcaatctggggaagcacgatcggattattgatcggacccttcgttattcccgtggcaggcattatattaggcccgtttatcggtgctctctgcgctgaggtgtttgttcatcaaaaggatatcaagtccgcggcaaaagtggggctcggctcgttaatcggctttttaacaagcgtggcggcaaaaggcgtcattcagctctttatgatcgggtatttcttatggacggtgctttagaaaggtttaatttcggccgtgaacggataaagtgtaatatgtctgctggaatcgccggattgtgagctttttcattgattaccacgctttcttttgttacattgagattagaaaagttcgcgttaagcggcatttcagtacatatatttaaaggaggaaaaaattatggcttacaaacttccagaattgccttacgcttatgatgctttagaacctcatatcgataaggaaacgatgacgattcaccatacgaagcaccataacacatacgtgacaaacctcaacaaagcgatcgaaggatctgcgcttgcagagaaatctgtagatgagcttgttgctgatttgaacgcagtgccggaggacatccgcacggcagtccgcaacaatggcggcggacatgcaaaccactctttattctggactcttttatctccgaacggcggaggcgaaccgactggtgagcttgctgaagagatcaaaagcacgttcggaagcttcgatcaatttaaagaaaaattcgccgcagcagctgcaggccgtttcggttcaggctgggcttggctcgttgtaaacaacggcaaacttgaaattacaagcacgccaaaccaagattcaccgctttcagaaggtaaaacacctgttctcggtcttgatgtttgggagcacgcgtactacctgaactaccaaaaccgccgtcctgattacatttcagctttctggaatgttgtgaactgggatgaagttgcccgtctttacagcgaagcaaaataattgagttgaatgatcacaaggtctcccgcgggaggccttgtttttttattgactttgattccttttacatatctcagtttgagtgagacaaactaatgtgtagtaaaggggagtcaatgatgagcaaaataaaaaaaattatcggcgacatcgaaataaataaagggctgctgctgttattgacgattggcggcctttactcattgggcatcgcgctgtcaaatacatttgtcaacgtgtatttgtggaagcagtcgggaaaatttattgatttggccatatacaatttgtcggtcgtaacgatgcagccggttacctttctgctggcgggccggctggctaaaaaaattgacagggtgtttattctaaggttcggcgttatctttttggccgctttttatttaagtgtgctgcttgccggagaaactgcggcttcccgtctcgttttgataggggccgtgctcggagttggatacggcttttactggctggcttttaatgtgctgactttcgaaatcacggaaccggaaacgagagatttttttaacgggtttttaggcattttgtcttcatcggcgggcatgatcggtccaattgtggccggatatgtcatttcaagacttgaaaacaatacgggttatacaatcattttcagcctgtcgctcggcttatttgcccttgccgtggtcatgagcttttttctgaagcggagggagtcgaaaggccggtttatgctgaaaaaagtttttgatgagcgccacacgaatctgaattggcgccggattaccaacgcgcacttttttcaaggcttgagagaagggatttttgtttttttaatcagcgtatttgtattcattgcgacaaacagtgagctggcgctcggaacattcggtctcgtcaattccgcggtttctttttttgcctattattttgcatcaaggctcatcaaaaaaagagcgcggaaaaaggcgattcttatcggcggattgatcttgtacggcgccctgtttctcatcatttttaaaatgagcttcacgacgctccttttgtacggagtgtttattgcgatcggctatccagttcttctcgtgccgtatgtctcgcttacatacgatgtgataggccgggcgcggcttgccagaaaagccagaattgaatacattgtgctcagggagttatttttaaatgcgggccggatcgtttccatcctttgtttccttgtcatcgttacattgttcaaggaaaaagtgggaataccggcggcgctcgtgctgctcggagccgggcatccgctgatttattactttataaaagacatcaaactggacacggaaacttctgatgaaacagtggaagaagaccgacaaaaacgggcggcggaaccgaattttataaaaggagaaagataaaagggttatctgtagaaaaatatcgaaaaaacctttagaatgaaaaatggcacctgaacagaaggtgtcatttctttctgtaaataagaaaaggtgatgtcatgaggagaaataaaaagaaaatagctgtaaacaaagaaaagaaaaaatcactgccgatccggcttaattttttgtttttggctgcgtttcttattttcacttggattatcgtcgagcttggcatcaagcagatcgttcagggtgatgattataaaaacgccgctaataagcaggaggagtctgatgtcagcacggcggttccgagagggaaaatttacgaccggaacctaaatcccatcgtaacgaataaagcattaaatgcgattacatatacacgttcagcctcaaccacccaggcgcagcgtttgaaaatcgcaaaaaaactgtcgggtatgattaaggtaagcaccaaaaaggtgactgagcgggataaaaaagactattggatgttaacgaggcctgatgaagcgaaaaaactgattacggccgaagaaaagcaaaaagctgaagacaaaaaactgtctgacgatgatttatatcagcttcagctgaaacgtatcacagacaaacagctgaatgagctcacttcaaaagatatgcagatccttgcgatcaaaaggcagatggattcaggctactcactgacgcctcaatacatcaaaaatgaaggggtgtcggcaaaagaaatggccgtcgtcagcgaacatttggatgaactgccgggagttgacgtgacgtctgactgggaacggtcttatccttataaaagcctgatccggacattgctcggcagtgtatccagttcgaacgaaggtcttccgtccaacctgctggatcactatctgtcacttggctacagccggaatgacagggtcggaaaaagctatttagaatatcaatatgaaagcctgctgcaggggcaaaaagagaaagtgcagaacttaaccgactcatccggaaatgtcacgggcagcaaagtgatttcaaaaggacaggccggcaaagaccttgttttatccattgatatggacctgcagaaatccgttgaaaaaatcattgagaaaaatttaaaatcggcaaaagcgagaccgagcacgaagcttcttgatcgggccttcgtcgtcatgatgaacccgaaaaacggagaagtgctgacgatggccggcaaacagattacgaatgaccatggaaagtacaaaattaatgattatgccctcggcgcaatgacttcctcctacgcaatgggatcggcggtcaaaggagcgacggtgttgaccggactgcagacgggcgcgattaatttgaacaccgttttccaggatgaacctatgtatttcaagggaagtaaaaacccgaaaaaatcatggacgaatttaggtcccgtagatatccaaaaagcgcttcaggaatcatcaaacgtgttcatgttcaaaacggcgattgccgtcggtaaaggggagtacaaaaaaggccagtccctgccgcttgatatgaaggcattcgatactttcagatactacttcaatcagttcggactcggagttaagacggggattgatcttccgaatgaagcgaccgggtaccaagggtcacagcgaatttccggtcttctgttagactttgccatcggacagtatgatacgtttacaccgctgcaaatggcgcagtatgtatctacaatcgccaatggaggctatcgtttgaagcctcagcttgtaaaagaggtcaggcagcctgattcgaaaaaaggaatcggagccgttgtagagtctgttcagccccaagtgctgaacaagattgatatgaataatgcagacattaaagaagtgcaggcaggtttcagacgcgtcatgacaaaagggacagccgcaactgattttgcgactgcgacttacagtcctgccggtaaaacgggtaccgcgcaatctttctatgacggtcctgacaaatcagagacgggtgaagcaacatataacacgactcttgtcgcgtatgcacctgctgataatccggaagtggctatttctgtagtcgttccttgggcctatattaattacagcgatcgatattcgattacggatgatataggaagagcagctctggacaaatactttgagctgaaaaagaagcaagaagataataatacgaagcagaaaaacgaagataaaattcaggaagacgctgaaaacggcaatacaaacaactaatagaaaaacgctcacaatctgtgagcgttttttttatacaaaaaaacatccggatttacaaaaccttaacacttgatttatacgcattttacaagaaccctttactctagacctgtaggacaaattacacattaaatgcagggggaattcaggaaatgaaaaaaaacaaatggatgcttatgcttctgatggctgctgttatgattgttgctgcagcatgcggaaatgcaaaggaaagcggcaagacagacagtcaatctgcaagtgcggataaaaaagcatcaggttctttaaccatttctggttcatcagccatgcagccgttagtactggcagcggcggaaaagtttatggaaaaacatccggatgctgatgtgcaggtgcaagcgggaggttcaggaacaggtctttcgcaagtgtctgaaggggcagtgcaaatcggcaactcagatgtctttgctgaagaaaaagaaggcattgatgcaaaagccctaaaagaccaccgagtagcggtagtggcgatggcggctgcggtcaaccccggtgcgggcgtaaaggatataaccaaaaaacagctgacagacgtctttacaggaaaaattaaaaactggaaagagcttggcggtaaagatcaaaaaattacactcgtgaaccgtcctgattcatcaggaacacgcgctacgttcgtcaaatacgcgcttgacggagcagatcctgctgagggcattacagaggattcctccaatacagtcaaaaaaatcattgcggaaacgccgggagcaatcggttatctggcattctcttatataaacgatgacaaagtaacgcctttatcgatcggaggcatcaaaccggaagagaaaaacgtcgtcacaggcgagtatccgatttgggcttacgagcactcttatacgaaaggtgaagcgtcaggccttacaaaaacgtttcttgactatatgaacagcgatgaagtacagaaaagtatcgtaaaagatcaaggttacattccgatctctgatatgaaagtcacacgtgacgcaaacggcaagcaaagctgaggggagggcgggctccccgcctcttcttccttataggagtgtaaacaaatgataaatcacagagaaaaagagtctgtaagcgaacgcttaataagctcaaaacaaaacaggcaaatggatgaagtccgcggaagggtgattgtgtctgtgtgtgccgcgattatcattgcggcatcagcggcgatcacaatttttctcggcataaaggggctgcaatctttttttgtaaatggtgtaagcccgattgagttcttaacaagtctgaattggaatccaacccaggcaaaacctgagttcggcgcgctgccttttattttcggatcatttgcggtcacggttctgtccgctctgatcgcagcgcccctcggtattgcgggtgccgtgtttatgacggaaattgcgccgacttggggaaaaaaggtgctgcagccggtaattgagctgcttgtcggcattccgtccgtcgtttatggattcataggtcttacagtattggttccgtttatcggctcttttaaatcaagcggaacgggtcacagccttctggcggggacgatcgtactctcggtaatgattctgccgactgttacatcgatttccgctgatgcgcttgcgtcacttccgaaacaccttcgcgacggttcatatgcgcttggtgcgacgaggtggcagacaatcagaaaggtgcttatcccggcggcgtttccgacattgctgaccgctgtcgtgctcgggatggcaagagcgttcggagaagcactcgccgtacagatggttatcggaaatacaaagcttctgccggaaagcctgcttgatacggcgggaacattaacgacgattattacgttaaacatgggccataccacatacggcagtattgaaaataatacgttatggtctatggggcttgttcttctcatcatgtcgtttctgtttatattgctcatacgctacttgtcgtctaggaggaaagtgtaatgaaccggaaaataacggataaattggccaccggtgtattcgggttatgcgccgctgtaattgcggcgattttggcaggattgtttttgtacattcttattcacggcgtctctgaaatctccttgcattttcttacgtcaaaatcgagcgccattgcgtcaggcggcggaatacgggatcagctttttaattccttttacattctgtttatcaccatgctgatcacgataccgcttggtgtggggggcggcgtctttatggctgaatatgcgccccaaaataaaatcactgattttatcagaacgtgtattgaggttctgtcttcgcttccgtccattgtcatcgggatgttcggcatgctgatgtttgtaaacctgaccggatggggctacacgattatcggaggcgcgctcgcattaacggtctttaaccttcccgttatggtccgggtgacagaaggcgcgctcactgcagttcctaaggagctgaaagaagcttctctcgctttaggcgtatcgagatggcataccgtcaaaacggtgctgattccgagtgcgattccttcgattttaaccggagccattctcgcatcaggaagagtattcggagaagcggccgcattgttatttacagcgggactgacaacgccgcggctgaattttacggatttgaacccgttttctgaatcatctcctttcaacattttcaggccggctgagacgctggcggttcatatatggagtgtcaatacgcagggaatcatccctgacgccgaagcgattgcaaacggcggctccgcggtgctggtgatttcggtgctcttgtttaacctttgtgcaagatggctcggatctgtcatttataaaaagcttacggcaaattaatcggaaagaggcgaaaacatgattgatcacatcatcagggaacaagcggaacagacaaagcgttcgccggagtcttcaattttggaagtgaagcatttatcaatttattacggtgacaaacaagcggttaaagatgtaaacatggatattgaaaaacatgcggtgacggctctgatcggtccgtccggctgcgggaaatcaacatttttgagacagattaacagaatgaacgatgccatcccttttgcaagaagcgagggagagatcctttatgaggggctgaatattttgggggaagcgattaatgtcgtgtctctcagacgggagatcggtatggtgtttcaaaaaccgaatctgttcccgaaatccatttacaataacatcacacatgcgctgaagtatgcgggggaacgcaggaaagccgttttggatgatgcggtcgaggaaagcttaacgaaggcggcgctttgggatgaagttaaagaccggcttcattcatcggctctttcgttatcaggcggccagcagcagcgtctttgtatcgcccgtacgcttgcgatgaaacctgccgtacttcttttagatgaaccggcctcagctctggaccctatttcaaacgccagaatcgagacgcttttgacagaactgaaaaaagattattcgattattatcgttacgcataacatgcagcaggcgctgagggtgtctgaccgaacggctttctttttaaacggggaagtggtggaatacgggcagacagaacaaattttcacgagtcctaaagcgcaaaagacagatgactacattaacggaaagttcggatagggggaaggactgtgagccttgtgaaggaagcggtgcacacacagaatttatttgatattcacggcatgaacgtatggtacggagcccaccaggctttaaaagacattacgatcggttttgaggagcggaaggtaactgcgatcatcggtccgtccggctgcgggaaatccacttttattaaaacattaaacttaatgctgcaaatggccccgaatgtcaaagtgacaggcgacatgatctataacggacgcaatctgctgaaagaaaagacggatgcggcagaattaagaaaacagatcggtatggtgtttcaaaaaggcaatccgtttccgcagtcgatatttgagaatgtcgtgtacggtccgagaattcacggcgaaaaaaataaaaagaaactgcttgaaatcgccgaggaatctttaaaggccgccgcgctctgggatgaagtgaaagatcgccttcaccagcaggcgctttcactgtcaggcggtcagcagcagcggctgtgcatcgcaagggcgctcgccacaaaaccggacgtccttctgatggatgaaccgacgtccgctcttgatcccgtgtccacgcggaaaatagaagagctgattttgacattgaaagaaaagtatacaatcgtcattgtgacgcacaacatgcagcaggctgcgagggtctctgatcaaaccgcgtttttctatatgggcgaactggtagagtggggggatacgggcaaaatattttctcaaccggatcatcaaaaaacacatgattatatcaccggaaaattcggatgaaaaaaacgggcccggccattgaccgggtccgttttatactgcctattaaaaaagcctgccggccatatccatctgaatggacgatgcctgcaagcttttttagcgggttaatgttttgacgatttttttaaagctcatatctgagtcgactttgaaatggccggcgcggatttctttatggtaacctgcgtcaatgacgtaatcattaaagtccttcgctgaaggaataatcccttctttttcaagaatggatgacacatcagcagtgctcattccgtctttaatcgtcagtttgtatgttacttttttctttttggcgtctgtgttttggtcgttgtttaacgatttttctttagaatcaagcagtttttgatagtcatcccggttgacggagactttttgctgatcgtcgaggtagctgtttacttctttctctgtcaatgctgttttttcggttttaacggcggctgcctggtcatggtcagtcaaatagaagacagcagcgagaacggccgtcgctaaaatcatgcctgctgcaaaagcctgaatgccccgttttgtcatacgagcaccttctcattatctttaataatggtattgacgtcctcgacagacacgtgctccgcttttgcgatggcttccgcagacattccgttgttatattttgaaatgatttgtttggcgattttttggttaatgccgctgcttttggctttgcggatcacgaggttggtttccagcaattcttcttcaagcaccgtcattttctttttcaacttgtaaatttcctgcatggcggaaagctgaagcgtttcaagctcctgttccacgtctttcatcggatctctttgagaatatgagaatgcaataagcgctatactgacgataaacaacgcaataatagcaatttccacgtttcatcaccttctattattaatttgcccttcttttttataccataaaacgccgccattctaaaggaaatagagaaaaaaacggaattttgtcgggaaatcttttttattcggggagcaaacggttatttctctatagatttcgtatcagaaagcccttttttgtcctgtttcgtcatattttcccttcatctgacgcaagctcattcagaggatcagaagcataaactgatgttttctgcacttaaacaacatttcatgtaaatcactctagcattccgtccattatagtggtattatgtataagtctgaataagtaaatgatatttagtttggagggaaaataatgcgcgttaatattactttggcttgcactgaatgtggtgagcgtaactatatttctaaaaagaacaaacgcaacaatccggaccgcgttgaatttaaaaaatattgcccacgtgataaaaaatctacgttacaccgtgaaacaaaataagctgtttaaaacagcggaaaaagctggagctttcaataaagttctggcttttttgtctttcagggaggtttgagaaacgtgaaagcacaaatcagaaccgatatcaaagcaaagctttctgacatgacagaaagtgaatgggaggcaaaatgccgcagcatgcgtgaaacgctgttttctttaaaagaatggaaacaggcccgcgtgatcgccgttaccatctcgacacgcctggaaattccgacacagccgattattgaacaggcctggaaagagaaaaaacaagtctgtatcccaaaatgctttccgcagacgggagcgatggagttccgtacattttctgcgtatgatcagctggaaaccgtatatgcgggcctcagtgaaccgatcgagagccagacggaaaaagccgcccaaaaagacattgaccttgtgattgtgcccggcgtggcttttgaccgggaaggcttcagaatcggatacggcggaggatattatgatcggtacctctccggttataaaggccgtaccgtgtcgcttctctttgactgccagctgacagaccgcattccccgcatgccccacgatattccggtcgatatgatcgtgactgaatctgaaaccatcgcttaatcgcataaaaaacttcttgcaccggaataattctcgctgtttgacaaacgataggggcaggagggataagatgaaaaaattgttgatctactcattatgcgccgtatctgttttagccgtttaccaaaaccgctaccgtctgatgaacagcgtgctcagccagccggggatcagacggtcattcattcatttctttttaaaaataccgtttatcagaaacaaattcattcagcaggcattttaaacaaatcccgtttttcagcgggattttttgcataagaaaacctgccggtaaaaaacggcaggttttctcgtattgtcagctttttttcaggaaaccgagcagaattgagatcataggagaaatgtacaggaaaaaggtaaacggcaggtagtcgatgacggaaacccctaatgcgcttgccataaaagcgccgcttactccccagggaatcagcgggttgatcaatgttccgccgtcctcaagcgaccgcgcaaggtgaatccgcttaatgctgagcttgtcatataaaggtttataagattgacccggaattaagatcgacaaatactgctcacctgtcgcaaggtttacgcctatacttgagaagacggtcgccatgacaagacgtcctttcgtatgcacgccttttatcaatccttgaagcagcgccgcgatcaggcccgttttttccatcaggccgccgagcgcaaaggcgatcatgatcagagagactgatcccatcatcgattggagcccgcctctgttgataatgctggccacagcctggtcgccggttttaaacgccgtcccgctttgcagggcggatataaatccttgaatgctgctgtcaggaataaaaacagcagtcagaagccctgcggaaataataccggcggtaagcaccggaatcacggaaacccgtctcacagctaaaatgatcaccaacagaggtgaaagaagcgaccaaggcgtaacgtgcacggcctcttttattccggaaatgaccgcctcaatattttgcgttgaagcggcatttattgaaaccgatgaaccgagaatataaaaaagaacaatcgtgatcagaagtgccggaacggtagtgcccatcatatggcgaatatgcttaaaaatcggaatttcgccgattccggcggcaaaattcgtcgtgtcggacatcggtgacattttatcaccgaaacaagccccgcaaatgactgctcccgccgtccattcgagcggaactcccgccgcgcttgctacccctaacagcgcgacgccgattgtactgacagttgtcagacttgagccgacaagcgtgctgataatcatgcaggaaaataatgcggtcaaaagcagctgactcggctgtataattgacaaagcgtaaacggtgacggtgggaatggcgccgctgtacatccaggcgccgatcagcacaccgatcaaagccagcacgataatcggctgcacaccgtttttcaatccgctgacaattcctttttcaagactgtcccacgagaaaccgagccacaaacctgccagagacagaataatgacgcaaaagaacagcggcatatgcggctctgtatgaaagaaaaacaggcaggaaataatgactgctaacatcaagacaaataaactgatggctgagatgaacgtcagccttttttcttgtttcaaaacaacaccccatcaaactttaatccttttgtgcttttgggcacgaaagtattgtaacagaaaaacgcataaatgagtgtttttttacaattgtgaatatacaatttatgaaaataatacaaggatattttctccaatcgttttttgcttgacgcccggatcagtgatgaaatacgcttatactaagaagaatagaaatggtgaagaagatgaattcattttatgacgtgcagcagctgtttaagtcattcggacatatcgtttatttcggtgacagacaagccgaaattgactttatgaaagatgaattaaaggaaatgtacttgtcaaacgtgattgaaagagaattatggcaaaaagccgccggagttcttcagagagaatcggagcggatcaaaggcagataacacagcaggattttaataagaaaaggagattattatggaagatacatggtttgcggggattgatcttggcggaacaaccatcaagctggcctttatcaacatgtacggtgaaattcagcataaatgggaagttccgaccgataaatcaggaaacacaattacggtcacgatcgccaaagcgcttgaccagaagctggaagaactgaacaagccgaaacggatcgtaaaatggatcggaatgggagcgcctggacccgtggaaatgacgacggggatggtctatgagacgacaaatatggggtggaaaaactatccgctgaaagaccatctcgaggcggaaacgggtattccggccgtcattgaaaacgatgccaatatcgcggcgctcggagaaatgtggaagggtgcaggtgacggggccaaagatgtcattttagtgacgctcggaaccggagtcggcggaggcatcatcgtcaacggagaaatcgttcacggaaaaaacggggccggcggagaaatcggtcatatttgcagtattccggaaggaggagctccgtgcaactgcggaaaatccggctgcatcgaaacgattgcgtccgcaaccggcatcgtccgcatcgcgaaagaaaagcttgcggcggtttccgactcttcgctcttacaagtgcgcgatctgacagcacgtgacgtgttcgatgcggctaaacagcaggataagacagcgcttgaagtcgtcgattatgtcgcaaaacatttaggcctcgtgctcggaaatctggcaagcgccatgaatccgacgaaaatcgtgctcggcggaggcgtgtctaaagcgggtgaaatcctgcggtcaaaagtggaagagactttcaaaatcaccgcattcccgcgttctgcggaagcggcggatatttcgattgcggcacttggaaatgacgccggagtcatcggcggggcgtggattgccaaaaatgaatggctcaaacatcaaaactgctgaagaaagtctgcctgcccatatcgcgggcggctttctttttttatctccccagtcatatagttttaaaaaagggggatgaacatggcgggaattcgtgtcaaacctgaattgaaacagcatatgaaagatattgcaaaggtgctttcaattgatgaaaaactgttgaaagccgctgataaaacggcggaaaacgatgaattattttgtcccggctttgccgtgagcgggcagtcagagggtccgccgcttgagacgctgagcgggctttcgcgatacatccggcactgtgaaaggattctttccgctgatcaatgggtgaaggaagaaaaggtgtacggctccgaatcggtttatgaagaaattgagaaaataacggatgtctttccgtttgtcacgtgccgtaaaatcggcagttccgtattgggaaagccgctttatgagctgaaaataggtgcggatacggctgaaagaaaagtccatgtaaacgcctcatttcatgccaatgaatggatcaccaccacggtcgcgcttaaatggtgtaaagaatattgcgcggcattatgcgaaaataaaaccgttttcgggcactctgcgcttgatatattcagcctgacatcattgtcattcgttccgctcgtaaatcccgacggtgttgatctcgtactttacggatgtgaagatttatcagaaaaaaatgaatttcttaatcgattaaatgaacaccgccgggatttccgcgaatggaaggcaaatataaacggtgtggatttaaataaacatttcccatccaattgggatattgaacagaggcgcaaaccgaaagccccttcataccgtgattttccggggacggcgccgctcactgaaccggaggcgcaggcgatgcaccggctgataacggagcagccgcctgaccggctgatcgctcttcatacgcaaggagaagagatttattggggatacgaagaatgtgaaccggagcaatcatcccggatgattcgggagtttgaagcgataagcggaaaccgctatcaaggcgttaaaaccattgacagccatgcgggttttagggattggtttatacagcagtatggaaaagagggctataccattgagctcgggaagggaaaaaaccctttgccttttcatcagtttgctgatatttatcaagcgacggaaggtattttgtggaggtcgcttgttttttgagacatctgtgaaatttctcatttgtttacataaacaaatatgggacaatagaaaagaatggagggaaggctggtgagatacttggtttgtgttctgctgtccgcattcgttctgtgtttagcggcctgtgaaccatctcatcagcagcaagacacaggcgtttcggcaaaatcggcagaacagaaaatcgttccgctcagtaaaaaggaagcggagaaaacggaaggatggctggataacagaacgatcctgtatacagcacatcatcagctgatgaaatatgatcttttcagcggaaaatccgaacggctctatgaaacaaagggcaatattgtcaatgtaaagatcagccggaaaaaacagctgattctcgtacaggtgacaagcagcggtcagactgagcttgtgcttatgaacaagcaggggaaaagactttatcacaaagcctttaactcttatgaactggagacggcttggaatccgtatgacccgtatcaaatgatgattaccgtttttactgaaacatgggacttcactgcctatacggccgatatgaacaacggcattttaaaaaagagtcccgttcaggctccttttgtccattggacctccactgatgaattccaatatatcaagcaaggaaaaacggaggaagagggtcctttatattcttatgacttgcagacaaaaaaagaaaaaagagtgcttcatcacgtcatctgggccgattcccgcccgggcatgacgattgccgtcagacaaacggatcaatcggacggagacggcgagttccttttccaaaagccggcatccgtgacgcaccgctttcctctccaaaaaaagtatcagagctttgcgccgatggaatatgattacgatcagacacacaagcggttttacatattcaagcctgaaggccgctcttacaatctgatcagctttgacttaggagacgaacgggagcggacggtgctcaaaaacacggaaatggagccgattcagatctctccgaacggggaatacgctttatacggctttacgtatgaccgtctgatttcactgaaaacaggcatgacagaaccaatcataacaaatgaaaaaggagtttgaaccaaatggcaattgcagatgtgacaatcattccgatcggaacaaaaacaccgagcgtcagtgagtatgtagcggatgtgcaaaacattttggagggttacaaagctgccggcaagatcaaatttcagctcacgccgatgaacactttgattgaaggtgagctgagcgacttattcgcagtcattcaggacattcacgaagccccgttccaaaaagggctgcacagagtggcgacaaatatccgcattgatgacagacgtgataaagaaacgacactggagagcaaaatcaaaagtgtcagcaaacatttgcagcaataaaaaataagcctgtatccattggatacaggcttttaatgtgcagtcggatagccgctggttacaacggtcattacggtaaaccagccaaacacgcccagcgtggcggcggctaacaaaaatcccaggatatttctctgtctgacagcccgcaggactcctaatacagctaataatgcgacaaggccgaagattacaacaagtaacatcatgctcctcctttgtcattggaacctgaaaatctttccatttcattttaaccgttttcattttgtttgtcgatagcgttttcccggccgcattcattgaatcttccgcagaaaaccttcataataagggcatatacataaagaggtgatgaaagtgaaatggagacgaatgccggccggtccgattcaggcaaacgcgtattttcttgtcagtgaggatcagtcctgtcttatttttgatccgggcggagaagcggacaaaatcaacaattacataaaagaaaacaatctgaagccgctggccatcttactgacgcacgcccattttgaccatatcggcgcgcttgacgaagtaagagacagatgggatgttcccgtatatcttcacaaaaatgaagaaaagtggctggaggactcttccttaaacggatcgggcatattgcgtggcatcgccgtaacggcacggcccgccgaacggctcatcgaaggcgacggcatattggacatcgggcctttccatttggagacattgtttacgccgggacattcaccgggaagcgtttcttattatgtgaaggacgcggatctggtgatttcaggtgatgtgctctttcagggaggcatcggccgcactgatttacacggcggaagtcaggacgtattgcttgattccattcatcaaaaactgctcacgcttcccggatatacacttgtgttaagcgggcacgggccggaaacggatattcagacagagcaggagcgaaacccgtttatcaatggtttttcactgtaaatgaaaaaagacagaccataatcggtctgtctttttctgtcagtgggttccgccgcccggtgtcataataaaaatagagtaatatgtaaatccggcgaaaaatacggttaagtaagctccgaaaatataaatatacatccgctcagtcagattcaaataagaaagaaatacgaaaaagatcgtctgtccaaaaaacaaaagtgaagcgtctttcatgccccctaaaaaaaacatgactgcaaatatccccgtccaaaatcctaacacccggaacatgcgattcattccttatcccctcccgagagtctatctgaagtttattataatagatcggcactcgaaatgtaaacattttcatgattatatttattgtggaatttatgtctttccctgtgttttatatcttatgccgccctctgaaaaagatccgaaaaatctttttgaaatatgtttaatgaaaaaaagttcagggtacttatgttaacaaagagacggattatccgagggaggaatttttaaaaatgaaagaacttattttttattcatacccgagctgcacatcatgccgaaaaacgaaacattggttaaaagcccacaatgttgactttcaagagcgccatctattcagggagacaccgacaattgatgaattgaagcagatcttatcattaacgactgaaggaattgatgaaatattggcgacgagaagtcaaacatttaaaaatctcaacctgaacattgaagaaatgactgtaaatgaagtgctgaagcttttgactgagaagccgaaactgctgcggcgtccgattctgatcgatcgaaataagctcgttatcggatacaatccaggagaactgatgaagctgacgaagaaaaaaacggtacatcaatctgtatcataagagaaaaacgaagatccgctgatcaaaatttatcagctaatcttcgttttttgcggttgcgggactgggctagctggattcgaaccaacgatcacggagtcaaagtccattgccttaccgcttggctatagcccatcggatgtaattacagtatgtgcgtccggcgccgatttatacatacaaaggaatttgaatggaggagacccgtgaaacatttgagtgaaacattatctcgaaccttaattgaagaatcaggtgaaatcacacgccagtggctgctcataccaaaatcggggcggcctacagatgatcagaaagcggaaatgcagcaccgtctgttaattgaaatcgttgccggcattttatcggaaaaagacggcggggaagaggagctgacaaaatgggcgcttcagttcgcaagggaccgggccgtccatgaagtaccggtctatgaaagcgtcacgagctttaaagaattccggagattggtctggaaccgcatacagacgtgctgtgaaacaatgtctgagaagcctggggcgaatgcggtattccattggggagagaagctgaacaaagcaattgaccatatgattgaagtatttacagaggaatattataaagtgacggttacacaattaaacgcccaaaaagaaatgattaacgaactaagtgcgccgattatgccgattgccgacggtattggaattttgccgctcgtcggcgaaattgacacctaccgggcaaaaatgattttggaatcggtgcttgaccaatgttcttcactccgtctttcttatttatttttagatatatcaggtgtgccgattgtggatacgatggtcgcttatcagatttttaaagtgattgacagcacaaaacttcttggcatagaaacgacaatctcaggcatcaggccggaaatcgcgcagaccgtcgtgaagctcggcatcgatttttctcaggtgaaaacggagcagagtctggcgaaagcgctggcaaaaaacggatttatcgtaaaagaatcattaagatgataaaaagctgaatggccgggagggatgtctccctcagctattcagctttgtcagcttcaatcgtaatgatatgatggctgtcgatttcttttaccgtaaatgtgtagcattcaaaatcaatggtgctcccgggcttcgcgtcaatatcctgagtaagaaaccagcccccgagtgtatcgacttgatcagccgtaatctctgttccgagtacatcattgacgtcactgatcagcaatttggcgttcaggagatagcggttcttcccaagcttttgaacggaaggtgtttcgtccgtatcaaattcgtcgcggatttcgccgacgatctcttcaatgatgtcttccgccgttactaatcccgcggttccgccgtactcatcaatgagaatggccatatgggcgtgttcccgctgcattttaacgaataattgataaatcggaatcgtctcaatcacatggatcgccggctggatgtaagggctgagttcgtgttttgtaaacgccgctccttctgacaggaatctgaataaaacttcttttatattgatgatgccgactacatgatctttatctccttttactacgggataccgggtatatttatttgttttgataatgtcccggagcatatgtcccgatccgctgtctaacggcagactcaccatttcattccggggcaccataatttctttggcagtgcgcttatcaaatgtaaaaatattatttacgtaatgcagctcgctttttttaatcatgccgcttcgatagctttcggccaggagcacccgcaattcctcttccgtataagccatttcatgttcggaagcaggcttcaagccgaacatggctgtaatcaggcgggcggaatgattgagcagccagatgaacggaaacattaacttataaaacaaaatcatcggtctggcagacaaaagtgtaatccgctcggctttttggatagcaaaacttttcggggcgagttcgccgataacgacattcacatatgtaaccagcagaaaggcgatgatcaatgacaggacttgggcaaccgcttcgtgaactccggtctttaaaaataacggctgaagcattgctttgactgtcggttcacccagccagccgatccccaaagcggtgacggtgatgcccaattggcacgccgataaatattcatcgaggtgtgtaatgacatgcttggctgcttttgctccttttacattttcctcaatgagctgattaatgcgggagcgccttgctttaacgattgaaaactctatggcgacaaaacacgccgttaataaaataaatagtacgatggcagatagtttgatgatatacaatgtaacgccttccgcgaaggaaggcttgcacctcccttttttcggaataataccactgtagaaagctgctcaaacatcgagcctggtttagcccgcctcatttacggtaataaaacaagaaagcgatactggaggatgacaagagatgaaggtacattcgggagcggactggctgtggtaccagctcggtccgcatgaaaaaacggaagcgaaaaaaatgatccatcacaatcactggccgcaatgcgaaaagtggtttgaacatgaaaatcatataaactttctgcgctcagatacaaatgatcagaataatgaagcggttttcggttctttaatctatcatcaaggattagatgatgaaaaaaaccataccgtatttcacttttatattacgagagacttcttttttacaattaattttgatttttcgctgctgcgcggtgtaaaagaaaagcatgccacacagcagattcaaacctgtgaaaatccgattgaaggcttttttgttctgctgggagagctgatgaattcctatctgatcggactggatgaatttgaagtcaagcagcggacgctgaaatggcagattcatgatgacaacagcaaaggaatcttggaaaatgtgcataaactgcgccatgagctgttcatttggaaaggccttacactgggggctcaaaaagtggaaatggctttaaaagaagcttttctcccgaaaaatgacaggcagaaagattacctcagagctcatcaaaagatggaaagaggaattacatatatcaatgagtttgatcaggaactgagcaatctgctgcacgccgaggaagtcattacctcccaaagaggaaatgaaattgtgaaagccttgacgatctttacaactctctttacaccgatgacggcgcttggagctctctgggggatgaactttgataacatgccggagcttcattggaaatatgcgtatatttgttccatcgtgctcattattgtatcaaccctgctgatttatatttatctgcggcagaaaggctggacaggggacattttgaaggagcatcaaaaaaaatatttgcggaaagaaaagaaacgctaagaagagcaggcatacgcctgctttttttgatggctgaaaatggccgaatggttccggatttcattcggtaaatcaatgtcagggggcttatttttatttttttacgttttacacactgtaaaacgcataatctctcctttgccggcttttgtgtatctgatttacaatacgtgcggaaggagggaagtcttgtgaaaaatatagaaacatacagcaggaacatcataaacgaggcctatacggcaagggcttcagatatacacattgtgccgagagaaagggatgctttcattcattttcgcatcggccatgctcttgtgaaaaaaagagtcttaaaaaaagaggaatgcgtaaggcttatttctcattttaagtttttatcggccatggatataggagaaagacgtaagccgcaaaacgggtcattgtctctgccgcttccgacggaaaccgttcatttgagaatgtcaaccttgccgacaatgaatgatgaaagtcttgtcatcaggcttttgcctaagcggcagattccccctctggataaattgtccttatttcggggggcgggcgccgcattattgtcctttctgaagcattcgcacggcctgcttctgtttaccggccccaccggatctggaaaaacgaccactctttactcgcttgtcaactatgcaaaaaggcatttcaaccggcgtattgtcacgcttgaagaccccgtagaaacaagagatgaggatgtgttgcaagttcaggtgaatgaaaaagccggagtcacatattccgccggtttaaaagcgattttaagacatgatcccgatatgatcatcttaggggaaatcagggatgccgagacggctgaaatcgcagtccgcgcggccatgacgggacacctcgttctttcaagcctgcatacaagagatgctaagggcgccatatacaggctgctggagttcggcgtgaacatgacagaaattgaacaaaccgtcattgccattgccgctcagcgtctggttgatttaacatgtccgttctgcaaagaggaaaactgttccgtgtactgccggatgtacaggcagacacgccgtgcgggcatttatgaactgctctacgggaaaaacctcacccaatgctttcaggaagcaaagggagagcacgccaattttcaatatcagacgctccgcaggctgatcagaaaaggaatcgcgctcggctatgtcacgaccgacaattacgatcggtgggtgtatcatgaagcggattaaacgaacctggccgttgaaggatcaagcggcttttttgaaaaggctcggtgaaatgacggaaaaaggatacagtctgattgaagggctcagactgctgcaactccagctgcataaacgtcagcttgcagagctgacggacggaatccgccggctgagggaaggtgatgcgttttaccaagtgcttgaggcactgtcttttcataaagaagccgtctctatctgctatttcgcggagaaacacggggaattgccgggggcgatgaaacaaagcggcgaattattacagagaaagctcatgcagacgaatcaaatcaaaaaaatgctccggtatccgatgtttttaatatcttccgtctgtgtcatgttttatattctgcaaagtttaattattccgcagtttgctgggatttatcaatcaatgaatatgaatacatccggtacgactgctttcatctttgcgttttttcggcattttcatgaagcctgcgcactggcgctgtccgccgctttctgcttgtttttgtacgtttggttcttatgtaaaaaaaaatccccgcaagataaaatgctgattgttgtgaaaatacccctcttaggaaaagcggccgttctttttaacagctactttttctctttacagctcagcagtcttctgaaatccggcctttctatctatgacagcttaacagcttttaaagaacaatcttttctgcctttttatcgtgaagaagcagagatgctcattacacgtctgaaagccggagaaaccatagaatccgctctttccgggcatccgtgttatgaaaaagaccttgcggctgcagtcagccacggacaggcaaacggcctgcttcaccgcgaactttatacgtacagccagtttatgatggagcgtcttgaacaaaacgcggcgaagtataccggcattctccagcctgtcatttacggtgttgtggccggtatgattttaattgtctacatgtcaatgctgatgccgatgtaccagatgatgaaccaaatgtaagggagtgcttcgtctgaaaaatcaagatggatttactttaattgaaatgctgatcgttttatttatcgtttccattctgcttttaatcaccattcctaacgttacaaaacataatcaaagcattcagcataaaggctgtgaaggactgcagaatatggtgaaagcccaagtgacggcgtacgaaatcgatcatgaaggtaaaatgccggatatgaacgatttacaatcagaggggtatatcaaaaagaatacagcctgcccgaatggtaaacagatcttaattagtggcggagaagttacagttgaacaataacaggcggacagaaaatgggtttacccttcttgaaagcctgattgtgttaagcctggcgtccgtcctgctgacggttttgttcacgacggttccgccggcctacacccaccttgccgtgcggcaaaaaacagaacagctccaaaaagatattcagcttgctcaggaaacggctatcgcagaacataaaagaacaaaaatcacttttcttccaaaagagcataaatataaactgcagtcaggcggaaggattgtcgagcgttcctttgattcgcttcacattacacttgtgactttaccggagagccttgaatttaacgaaaaaggccatccgaattcgggaggaaagattcaattgaagagcgccgggttcacctatgagatcacagtttacttagggagcggaaatgtccatgctaaacggaaataaggggttctctactattgaaacactatcagcaatggccatttggctgttccttatgacgtctatcattccggtctggacgggcatgctgactgatggtctgaaaatagaagatcgccatgaagcgtaccagcttcttcagaaacatatcagcacttatatgatgaccggaaaaaagccgccgtctcccggtgtgaagtggaaggaggatggtgagtattacaaagtgtgtacggctgaccgcagcgaaaaagaaatgtgcctcagcattctcaaaacagactggctttacgcttcttaatgttttgttctccttggcagtctgtcttttcctatcaggcaccttgggcccgattttacatctgtttttatcaaaccggaccgataacggcggattagacagccgggagcatcaaattgccgttcagcagatcatgaacgaatgtaaacaggctgagactgtgaagccggcggacggcggacgggcgttagcatgccggaaaacaggaggcgaagaagtgcgttttgaaatttatcataagatgataaggaaaagagtaaacggaaaaggccacgtgccgatcctgcaaaacgcggcatcattaacggctgatgtgaaaaacggcctgctcttattagagatctcaagcgttgcaggtaaaaagaatcaggcggtcattccggtttacagcttttttaaaggtgattaaatgtacaaatctgacggttttatatatcccgcggttctgtttgtttctgccgcagttttacttgtcatcagctatacttcatctgatttcatcacccgaaaaacatttgcaaaagaggccggggagtactggaccggagagaacctgctccaaaacggcgcgctgctgtcaagccgccatatgacacagggacaaaaggtccaaactggtacacagcgttttccgtatggcaccgtttcttttcacatcacggggagtgatcgccgggaaacggttcaggttacaattcaggcggaaacaacgacaggaacgagacgggaggctcaccttttgttcgatcagaagaagaaacagctgattcaatggacggaagtataaaaaagaggcggcgggacaacacttcatagtaaagacagcactatgaggtgagagccgtgaaaacaaatgattatgtaaaatatatgactgagcaattcgttaaatatttcgatacgccgaaacaggaacggagagagcgaaaagaagtgcggaaagaaaagaaagtgccggcttctcagcactggttcggaatattgccgtatagttttaagctgtggatgcagcggaaaaaataaagtgaatcacacgaaaggccctcctgatacaggagggccttattggtattcctcaatgacggcaattttatttaccttttggctgtagggattaaaagaaatcgtaacaaacacgccaaattcttttgcgccatcccgcaatgtcaagtggtattgcttgactgcttcgtccgttcttttccgatcccacaccttttgaataaataacgtttgggcgagcggatatctttttttagcttccttttctgctaacttttcccattttgatttatggtgaacagcataataaggcaccgtttccgcctgagctgttcctgaaaccccgaaaacaagaagagaaaggcaaatcagactttgtttgatcatcattcttcgtcctttcgctgtatatactttccattttgttctaggcacctcgttattttctcacgttttattagaaaaaattccaaaaaggtgtgtaatttgaagcaaaacgctgtttttaaaagataccattctcaaaaacgaacaatttgaccgattttgacatttttcaagacgataatccttgattatactttgttcatacagttctttaaagagaacggttgtcatatttattaacagttttacagggggtaaggcatgttccgattgttgcgaatggaaaaaaagggcaaggtgagatggcggatgatgctatttttacggctttcgttcattttttgcctgtccgtgacgatatgtgctcagttcacaggtgatacaagttcctccttcaatgatgtaaaaagcttcagtctccaggttcaaacgtgcggagattttcaatatacggatgacgattgccgttatgacgaacgctgggatcaaagtgatttacatataacaaatcaaactgatacgtcaggcaccgtgtgtgcgccgcttcagctctatgccgagctggagaataagggaaaagagcggactgtttctgactggaaatgggagctccataaaatcgcttctcagcagcagcctttacgaaacggcaatgttgtggaaaaagggcttattactgataaaaaaagcaaaacgatttataaaattaagtcaaagcggtctttgcagccgggcatatacgcattcaaggtttacaagcctgaagggtatccggcggacgaagaaaaatttgagtggtcaaaaccgatgaaactcgtcaaatgccgggaacaggcgaccgtttccgatctaaagaaaacggagaaagagccggctgagccggtaaaagaaagcggggaagaacatgaaaaaaacgctgaaactgatcagtaatattttgtatgccgtcatcttcagcttgattattgtgctgacgttaacggtgatttcgacccgggcttccgggggtgagccggccatcttcggctatacgctgaaatccgtgctgtcgggttcaatggacccggaatttaagacgggttcgctcatagcggtaaagaaaatttctgacgtgaatgacttagaaaaaggggatgtgatcacctttacgcaagatgacggaacagccgtcacacacagaataatcggtatcacaaaaaaggacgggaacctgctgtttgagacaaaaggggaccataatgccgccccggatgccgcacccgttcaagctgaaaaagtggcggcccagtatacgggatatcagcttccgtatgccggatatgtcatccatttggccagccagccgatcggaacggcgattctgttaatcgttcccggcgtcatgcttttgatttactcaataacagtcatcgtcagcgccctccgcgatattgagcggaaaacgaaagcgctggaagaacatgcgaaaaagtgaaccatctctacatgaatacggttgcaacctggcgacaggatttgataacaaaaataaaaagtaaggggagagtacagacatgggtatgaaaaagaaattaagcttgggcgttgcctcagccgcactcggtttagcattagtaggaggaggcacatgggccgcatttaatgatgtgaagtcgacagacgctacatttgcgtcaggaacacttgatttatcggctaaagaacaatcagccaatgtcaatttgtcaaacttaaaaccaggtgataaattgacgaaagattttgaattcagaaacaacggttcacttgccattaaagaagtgctgatggctttgaattttactgactttaaaggagcaaagaaaggaaatgaatctgcggaggatttcctcagtcagtttgaaattacggttctgacagtcggtaaagaagggggcaacggctatcctaaaaatatcattttgaaggcggccagcctgaaagacttatacttaatgtcaacaaaacaggataaagcagctgccgaagcgatcagcaagcacattgatccgaaattcctgagtgagagcggaaaagtcaatgtagcaaccattaacggcaaaacagctcctgagtacgacggagttccgaaaacgcctgctgattatgaccaggtgagaatggaaatccaatttaaaaatgacaccgcaaaaactgcggacggattaagtgtgcaaaacaagttccaaggcaatgcgatttctcttcaattctcttttgaagcaacgcaatggaacggcttgaccattacgaaagatcatacggataaagacggttacgtcaaggaaaatgaaaaggctcacagtgaggataaaaactaatccgaaagtcggacagttaaaagaggagttgtgcacatatggcggcactactcctctttttgcgcttttctccatttttgataatctaaaaattcacgaaattgtttttttgataccccggatgtcatcgcatcgcgaactaatttctcccattcactatctaattgaccatcgtattcggtttcatgtttttcatcaagtaaagtatgaaccgagacgtccagaacagcggagactttttcgagaaattgaatggaggggttcgtctgtaaatttcgttctattgagcttaaataagacttcgctaccccagctttttcagctagttctgatagtgagtagcctttttcttttcggtattgtttaatacgctggccaatcaatgtcatcaccttccttgtgatattatagcacattcagaaaggatttacggtatgacttctggctgcctggatatgttgagaagactttttatgcgaaagcaggtatttgcgtatttcttctaggctgatatttgctttttgggcttctaatatcagctcaacccattccttatctaattgcgaaaattccatttttgcatttttcatgcattttctcctcctaaaatacttgtttatgtatttcagccaatccgcccatgaccttatctttacatgtctggaagtgattcatcgcatgcgaaacgccagaaattttttctatatacttttattataatatagaatttccagaaaaaacgggaaaggtgtcgaatggataacgcttatccagaaaaattactttgcaggaaaaataaaccgccgttttcaatctgaatgtgaattttcggctgatataaggctttcagcgcttgtttttccaaatggtattcctcaggtttttcctctgtctgctcataaaactgatcgagcagcctgaggtcctttttccatctggcgatcgcgctgtcagcccaggctgacggctctttggcggcagcgtcttttaagtaatgctccattcttttaattccgctttccggcttaatcatcggcgatatggtaaagcaatagtctgatatttgcgaggtcagcggaagcggtgcaagcttctgctgaaacccctctataattgttccagaaacaagatgcaggcctaaagacaaaagtctgtcttttttcatgtcggattggtatgaaatcactacatttaatccaagccagggctgaagcggcactctggctccggctgatacaattttctcatatattcttgtaaatctcccattttgtttaactgcttgaaagatttgaaagaggcgcggggctccaaagtaaataaattcgccgtccatatcctccggagccgtttctttatcagtgatgaacgtgatcttcatcgggttcggttcgccgcccgttttttcacgccaatgccaataaaacgggcggttcataatttgtttgtccatctcgaccgtcaactgaaccgtcataaaacccggcccgtgttctgtaatcggacagtggttcgcttcaaaaaagcgcagtaaaaattcgtgaacctcctgctgtctcatgtcgcgcttcctccttttagattaagatcctttttttctggcgggcttttccgtaccgtacgacagaaaagaggtgagattgtccattttgattctcatttcttcctctgtcagcgaatggcataaaatatcatgcaaatggtcttcaaaattgctcactttgatttttgttaaaatgtcatctaattctccgacgacattttcaaataaatgaattttgtcatacagaagttttaaaatatgctcttccaccgtatgttttgtcgccatattgtagatatggacatctctttcctgaccgagtctgtgaatccttccgattctttgttcaagccgcatcgggttccacgggaggtcataattgataatatggttgcagaattgcaggttgatcccttcgcctccggcttctgtagcgatcagcacctgcactttgccgcggaagagatccttcatccagtcttttttcccgcgtttaaatccgcctctgaacggaacggagcttatgccgttctgctgaaggaaccattgcagataaatctgtgtcgccctgtattcagtaaaaataatgactttatcattaatcttttggatcaagtcaacaacttgaattgcttttgagttttgcgtgacttgattgatgcggtccattaaattagcgatcgtctgatcatcgaatgcgggcgcttgtttgtctttttggtcaagcatttttttgagcgtcatatacacggcttccctgcttgaacagcattctctttgcagcgtcataatggaaaatgcgcttgcgggcttttccgtgccgtttttcagtgcggcgatgtcatcgtaaagcgcctgttccgtcggtgaaaaggtgatcggcactgtttccacgtggcgcttcgtccatgtaaggccggtgtcgctccgcgtgttgcggatcatcaccttattgacgagttctttcaaatgctcatgagcgtcaatcccgtccttctgattgaaggtttcttgaaatccgctttcgtttcctaaatggccgggctttaacagtgacactaaattgaagatttcttcgatccggttttgaatcggcgtcgccgtcagaagcaggcagtatttcttcacaagacttctcgcaaattcataatttttcgttttgctgtttttgagcttgtgcgcctcgtcaataatgacgagatcatacggaatagaaaggacaatgtctttgtgaggcgagcgtttggccgtatcaatagaagaaacgacgatatcgcactgttcccacacatagcttttcttctgttcaacagcgggtattaaaaacttctcctgaagctctttcacccactgggaaacgagtgatgccggcacaagaatcaggatttttttggccagcccgcgaatcatatattcttttaaaatcaggcccgcttccaccgtttttccgagccccacttcatcagccaaaatcgccttgccgttcattttttcaacgactttctgcgcgacctcaagctgatggggaagcggagtgaaatcgggcaggtataaaggagccctcaacccttcaaattcaggaatggcaagggtctgctggacttcagccgacagtttgtacatctcccaatttgaccagggaccgtccgttttcagccgctcagaaaactctcccggccagtttgcatcaaatatgatctctgctgtcatatgtaacaaaaccgcctttcttttaaaaaactgatttatcataatttttgttgccggacgtaaatgagggtggtaggatataagtaatgatttcactaaaagatattgctttagtatgtccataaaattggtaaatatgagcgaatgacagcaaggggagagactcggacgaaagatgggcgtccgggcgccgaaggagcaaactgcggagtgaatctctcaggcaaaagaactcttgctcgacgcaactctggagagtgtctgcacttagaagcagcagaccaccaaaggggacgtctttatgatatgttcataaagtaaactttcaggtgccgggacagagaaaccttcattttcatgaggtgtttctctgtccttttttatatgtttttacaatgcgccaatgactgaagggggaagatgatgctgaaacgaacaccgctttatgacgtgtataaagaatacggcggaaaaacgattgattttggaggatgggagctgccggttcaattttcttctattaaagaggagcatgaagccgtccgcacaaaagcgggcctgtttgatgtgtctcatatgggggaagtcgaagtatccggtaaagacgccctgtcttttctgcaaaaaatgatgacaaatgacgttgccgatttaaagccgggaaacgcgctttataccgccatgtgttatcctgacggcggtacggtcgatgacttgctgatctatcagaaaagcgagagctgctatctgctcgtgattaacgcgtctaatattgaaaaagacatcgcctggctgacggaacatgcggaaggcgatgtcacgctgacgaatcagtctgacgggatttcactgcttgctgttcaggggccgaatgctcagtcggttcttacgaagctgactgaatgtgatttgtcctccttaaagccgtttacatttattgatggggcggacgttgccggacgacaagtcctgctttcaagaacaggctataccggtgaagacggatttgagttatattgccgcaatgaagatgcggttcatctatttaaggagatacttgcagcgggagagcatgaaggcctcgttccgtgcggcctcggcgcccgtgatacgctgagatttgaagcgaagcttgctttatacggtcaggaattgacgaaagatattacaccgattgaagccggaatcggatttgccgtgaaacacaagaaagattccgattttttcgggaagtctgtattgcgcgaacaaaaagaaaaaggagccccgcgaaagctggtcggacttgagatgattgaaaaagggattccgagacacgggtacgccgtgaaaaaagacggtgttccgatcggtgaaatcacgacaggcacgcaatctccgactttaaagaaaaatatcggccttgccttaatcaaaacggaattcagtgaagtcggaacggaagtagaagtggaaatccgtaaaaaaacggtaaaagcgaagattgtccgcacaccgttttataaacgtccaaaacagagctgaaaaaggagagtcatatgaagcatcgatatttgcccgcgacagaacaggataaaaaagaaatgctgaaagccatcggcgcagaaacaattgatgaactgtttgccgatattccggaaaatgtacggtttcaaaaagactaccaaattaaaaaagcaaaatcagaaacagagctgacgagagagctgacgaagcttgcggcgaaaaataaagacgctgttacatatgcatcttttctgggtgcaggagtgtacgatcactaccagccggttatcgtcgatcatgtgatatcccgatcagagttttacacggcatatacgccttaccagcctgaaatctcacaaggagagctgcaggcgatttttgaatttcaaacgatgatctgtgaattaacgggaatggatatcgcaaactcctctatgtacgacgggggaacggcgctggcggaagcggcgatgcttgcgtcgggacatacgaaaaagaaaaaaatcgtcatttccgcagccgttcatccggaatcgcgggatgttttgaaaacatacgcaaagggccaatatattgaggttgtagaggtgcccgcgaaaaacggcgtcacagatcttgaagcattggaacatgccgtttgtgatgaaacggccgccgtgatcgtccagtatccgaacttctttggacaaatcgagccgttaaaggacattgagccgctcgcacataaaggaaacagccagctgattgtttcttcaaacccgctcgcgctcggtattttgagaccgcccggggcatacggagctgatatcgtcgtcggggacgcgcagcctttcggcatacctgcggcgttcggcggcccgcactgcggctattttgcagtaacgaaaaaactgatgagaaaggtgccgggccggcttgtcggccaaacggaggatgaaaacgggcgaagaggttttgttctcactcttcaggcgcgcgagcagcatatcagaagagacaaagccacgtctaacatttgttcaaatcaggcgctgaatgctttagcggcttcagccgcgatgacggcgctcggaaaaaacggcgtcaaagacatggcccgccaaaatatattgaaagctgattacgcgagacgccaagcggaaaaagccggcttgcacgtagcatttgacggcccgatatttaatgaatttgccgtcaggctgaatcttcccgtcaaggaagcaaaccggcggctcctgcaagacggcataatcggcggatatgacttaggccttgcgtatccggaactgaatcagcatatgctcattgccgtcacagagctgagaacaaaagaagagatcgattcgcttattgcgggattgggggatcaacatgaataatcaagatcaggcgcttatttttgaaatgtcccgcgaagggcgtatcggttacagccttccggagcttgatgtgccggaaaaagagcttgaaagccttcttcccggtgactatatccgcgatgaagacgcaaagctgccggaagtatccgagctcgatattatgcggcattataccgctctttctaagaggaaccacggagttgattcaggcttttatccgctcggctcctgtacgatgaaatacaatccgaaattaaatgaaaaaattgcccggatcgcaggtttttccgccattcatccgcttcaggacgagggcacggttcagggggcgcttgagcttttatacgatttaagcgggcacttggaggagattacgggcatggacgaggtgacgctgcagcctgcggcgggcgctcacggcgaatggaccggcctgatgatgatccgcgcctaccacgaagcacggggagacttcggacggacgaaggtgattgtccctgattcagcccacggtacgaatccggcatccgccacggtcgccggttttgaaacgattaccgttaagtcaaatgagcacggactggttgacattgaagatttgaaaagagcggtaaacgaagaaacagcggcgctgatgctgacgaatccgaacaccctcgggttatttgaggaaaacattacggaaatggctgaaatcgtccatcaggccggcggaaagctttattatgacggagcgaatttaaatgccgttttaagtaaagcaagaccgggagatatgggatttgacgtcgttcaccttaatctgcataaaacatttaccgggccgcacggcgggggaggaccgggttcaggtccggtcggagtgaaaaaagaattcattccgtatctgccgaaacccgttctcacgaaaaaagaggggcgtttgacttttgactatgaccggccgcagtcgatcgggcgtgtaaaaccttattacggcaacttcggcattaatgtcagagcctacacgtatatccgttccatggggcctgacggcttaaaagctgtgaccgaaaacgcggttttaaatgcaaattatatgatgagaagactcgcgccttattatgatctcccgtatgaccgtcattgcaagcatgaatttgtgttatcgggaagaaggcagaaaaagctcggcgtacgaacgcttgatattgccaaacggcttttagacttcggctatcatccgccgactgtgtattttcccctcaatgttgaagaaagcatcatgatcgaaccgacggaaacggaatcaaaggaaacgctagatgcgtttatagatgccatgattcaaattgcgcgggaagcggaggaatcgcctgaaatcgttcaggaggcgccgcatacaacagttgtcaaaagaatggatgaaaccaaggcggcaagaaagcccgttttaaaatacgaacgtacacttgacggcagccgctgacacggtgtaaaaaaaaagagctgtccgttttatacggaagctcttttttatgattagttttttgctttaatttttccgccccattttttaaatccgcctttcaggttgtaaatatctttacagccgtgtttgcggagcgtctgtgccgcgcgtccgctgcggacattgttttggcagtacagataaacgggtttatcaggacggatttcacttttgcgctgtttcagctgtgacagcggaatgttgcgcgcgccgagaatatggccgccttcaaattcattcggttcacggacgtcaatcagctgcgcttttctgtagcccgcgcggaattcctcttccgtaagtgttttcattaaacgctgctggtaaaaatacgacacgatcatataaacgataaacgcagcaacaataattaaagcaatcatattagacaatgcgattctactcctttaacttataaaatcaaaaccctgcttcctgaaaacaaggcttaccggacgttttgggacaaatactattatagtaaagcatgaagcgattgtcatccttaatgaaacgaaatatttttcattttcaaggcagtttgttaaactgattttattaaaacgataaagaagggttcagtgtatggaaaaagaaacatggcggtttattgactcagggaatgaaagcccggcatttaacatggcgctggatgaagcgcttttatattggcacagccaaaaaaaaattccaccggtgatccgtttttacggctggaatccggcaactttgtctgtcgggtattttcaaaatattaagaaggaaattaactttgatgcagtacataaacacggcctcgggtttgtcagaagaccgacaggcggacggggtgttctgcatgataaagaattgacatacagcgtaatcgtttcagaggatcacccggaaatgccggccacggtgacagaggcgtaccgggtgatttcagaaggtattctgcagggattcagaaaccttggacttgatgcctgctttgcgattccgcgaacggagaaagaaaaagaaagcttgaaaaatccgcgctcgtccgtctgctttgatgcgccttcgtggtatgaactggtcgtcgaaggacggaaagttgccggaagcgcacagacacgccaaaaaggcgtcattcttcagcacggttccatcctgcttgacattgatgaggataagctgtttgatctgtttttatatccgagcgacagagtccgtgaacgcatgcagcggaatttcaaaaacaaagcggtagccatcaacgccttagcgccgaaacgggtaacgatggatgaggccagaatcgcttttaaagccggttttgaggaagggctgaacatacatcttgagccctacacactcacgtctgaagagcttgcatttgtcaatgagctggctgagacgaaatacgcgtccgatgaatggaattataagcgctgataaggcttgacagaccggaagcatccttgttttttcatgaccgttagtgtaaacttgtaatggtttataaagttaaggtgctttttgggagggttacttatgacaacaccaagtatggaagattatattgaacagatttatatgctgatagaagaaaaaggatatgcacgggtttctgatatcgcggaagctttggcagtccacccctcctctgtaacgaaaatggttcaaaaactagataaagacgagtatttgatttatgaaaaatatcgcgggctcgtattgacgtcaaaaggcaaaaagatcggcaaacggctcgtatacagacacgaattgcttgagcagtttttaagaatcattggtgttgatgaagagaagatttacaatgatgttgaaggaatcgaacatcatctgagctggaacagcattgaccgcatcggcgacctcgttcagtattttgaagatgacgaaagccggaaaaaagaattgaaatccgtacagaaaaaaaccgaaaatcccggtgaataaagggcagcccgaaatggggcgccctttttttaatgtcttcattctttggtctatttcgcccagccgtttcttaaaataataatacaccttgagatggaagggagagggcgcgctatgcagattgacggcgtattttcgggcggggggataaaaggggtggcgcttgccggcgcttatgaagcgctggaagaaaagggctttcgctttgaaaggctcgccggaacaagcgccggcgcaattattgccgcatttatcgctgcgggctatacgagcagagaggttcattccatcatagatgaggtggacggaaggcaattgcttgatcagagatactcattcctcccgctgaaaatcctgcggtgggtgtcgatatattggcgcctcggactatacagaggcgatatgctggaaaaatggattgcggataaattaaaagcgaagggcatcatcgcgttcggcgatttgaaaaaaggctcgctccgtctcatcgcttcagatctgacgaacggaacgatgatcgtgcttcctgacgatcttccccgctacggattaaatccggagatgttcccggttgccagagccgtcagaatgagctgcagcattccttatttttttgaaccgataaaactgaagacagaaaaaggcagctcaacggttgttgacggcggcgtgttaagcaatttcccgatttggctgtattcaaaagaacgcaaacggccggtcatcggaatttcgctttcgccaaacgaaaaagagcgcccgaaaaaatcaatccgcaacgcttttgagctgttcggggctttgtttgaaacgatgaaagacgctcatgatgccaggcatatcgcgacaaagtacgaacagaatattatttttattccggtggaacatgtgatggcgacggagttttatctcacaccgcaaaaaaaactagctctcattgagctaggaaaaagcagaacagagcaatttttgaagcaatggagctattaaaaaagcgctctgtttttctttttattctttttgccttctatgacggtaagctgggtctggctttttttcttaagaatcatcggcttcggtctgctgctgctcggcacgctccgcaaatggctgacccggcctctgtgtccggcgcggtgcttcgctttttgctccttcattcggagccgcgattgtctggccgcttttctgaaagcggttccgtcacggccggtgcggcggttcaggaccgtcctcacgataaaataaattatgatgcctgcgataataacggtgatcgctcttgaaatcatctgcccggggttggttaccgccgcataaatgaaaccgaatgcgccaagcgctatcaatacagcaaaaaaaggttgtacacgatgattcataactgcccacctccaaaataataacggtaacggttcagattacgttgtgagacggtttttcgctctgttctgaaatgtcttccagtctgagaagctcgttaaagctttctatggcaacctcgacctggtcatccgccggttcctttgtcgttaaaagctgcagccacaggccgggataaccgagcactttcaaaacggggatattccgcactctgttcgtcagctggagcacttcaaaggagatgccgagaacgaccggtataagcgcaatcctgtctaaaatccgcacccaaagcggatctgtcggaacgagtaaatagatgaacatgccgacaatgatcgtaaataaaataaagcttgaaccgcaacggtaatgaagccgtgactgtttctgaacattttctattgtaattggcaaattctgttcataacagtttatgaccttatgttcggctccatgatattgaaacactcttttaattaacggcgtcattgataaaaaataaatgtagccgagaagcagaataagcttaaacagactttcgattccgatctgcgcggcgtctgaggaaaatacgggccttacaagctccgctaagaagaccgggacgagcgtaaaaacgaatttgctgaacaaaaacgacagaacgccgatcaccgccaggctgaaaaacatcgataagcccgaacctttcttatcttcctgctccagctttgcgtcatcttgaggatcaagcccgtaacgttcgctggaaaagtttaaatgctttgtgccgttggcgctcgcctcaatgatggcgacgattccccgcaaaaaaggaatcttttttaaagccgaaagcttggcgttcggcactctcggaagcttgaaaaaatcaatgcttccgtcattcctgcggatggcggtaacataattttttctgccgccgaacatgaccccttcaacgacagcctgcccgccgtaagcagggggcgttttttgtttggacattgtttatcaacctgcctgtttttttaggatttactaaccatttcctttcactctattgtacaggaaaccgcggtaaacctctagttagacagccggaaaatcaatgctttttctacatgcagtataccccgtttctttagattttactcattgaatgaaaatatggcgcagctttttatgacttttcaattttggggcagtctatgactggaggtgccatgatgacaagcgaaaaacattcagaacaggaagaaaaaaagaagcaggatgatgatcagcagcctgtttcatttaccggcagaatttgcggtatcggatttgccggcggtgtattttggagtttgatcggctatctcgggtatgtctttcatttttcagagatcagccccaacatgattcttcagccgtttatgatcggagaatggaaaaaacaatggctcggcacgatggtcagcatcgttgtcatcggattcatttcaattgccggggcgtttatttatttcgtctgcctgaaacgttttaaaaccatgtggccggggatggtgtacggcgtcattttatggtgtgcggtttttttcttattcaatccgattttcgaagatgtgaaatccgtcactgaattgaaatcagatacaatcgtgacgacgctttgcctttacattctgtacggtttgtttgtcggctactcaatttccttcaactacaatgaacttacgtcagacaagcttgcaagggcgcttggcaacaagtgaataagtgtataatccctgtccggtatggtaaaatgttcacgagaagtgaacattttttatgctgaaaaccgggcggggatgctcccgcgttgtcaggcggcagtcaagaatcggcgaggaggagaaagggaatgaaacttgagaaattgcgaaatcttttcggtcagctggatatagacggaatgttggtgacaagctccgccaatctgcagtatatgacgggatttacgggttcgtcaggccttgcggtcatatcgaaagaacgtgcggcatttatcacggatttccgttacaccgagcaggcgaagacgcaagtgaagggttttgacattatcgagcacggcggaagcttaatccaaacggctgcggatacgattcttgagtacggcattaaaaaactcggcttcgagcaaaacagcatgacgtacggaacatatgcatcctaccaagcggtgctgcaggaagcggagatggttcccgtcgcggattccgttgaaaagttgcgcttgattaagtcaagtgaagagattaagatattagaggaagctgcgaagattgcggatgatgcgtttgaacatattctgacgtttatcaaaccgggcatctcagagatttcagttgcaaacgagcttgaattttatatgagacgtcaaggagcagacggctcttcctttgatatgatcgtcgcctcgggagtcagatccagccttccccacggagtggcaagcggcaaattgattgaaaagggagacttggtcacgctcgatttcggcgcttattataaaggctattgttctgatatcacacgcaccgtcgcggtcggagagccaagtgataaactgaaagagatttatcaggtcgtatacgatgcccaagcgcttggtgtcctgcatattaaacccggcatgacgggaaaagaagcggacgccctgacgagggatcacatcactgcaaaaggctacggacagtatttcggccattcgacaggacacgggttcggaatggaagtccatgaatcaccggggctgtctttcaggtcatcggccgttcttgagccgggcatggcggtaacggttgagccgggcatatacataccggaagttgggggcgcaagaatcgaagatgatatcatcatcactgacgacggcaaccggacaattacgcattcccctaaagaattaattattttgtgatcggaatataggaggacatcaaacatgatttcagttaacgattttcgtacaggactaacgattgaagtagacggcggcatttggcgcgtcgttgacttccagcacgtaaagccgggaaaaggagcggcatttgtccgttctaaattgcgtaacctccgcacgggcgctattcaggagaaaacattccgtgcaggtgaaaaagtcgcgaaagctcaaatcgaaacaaaaacgatgcagtatctttatgccaacggcgatcagcacgtgttcatggatacaagctcatatgaacagcttgaattgaacgaaaaccaaatcgaagaagaattgaaatatcttctggaaaatatgtctgtgcacatcatgatgtatcagtctgaaacgctcggtattgaactgccgaacacagttgaactgaaagttgttgaaacagagccgggaattaaaggcgacacggcgtcaggcggcacaaaacctgccaaaacggaaacaggccttgtcgtaaacgtaccgtttttcgtgaacgaaggcgatacgctggttgtaaatacatcagacggctcttacgtgtcaagagcgtagtcaaagaaattcggagtctgctccttttacggggcaggctttttttgcgttctgcctgaatctttcttctatatgaaaatagtgagactacttccgtcagctagagcatatagtgtaacaaaatgcttgaagttgggggattgcaatgaaatttttgtttggttcaatcaattctactgttttaacgatggccggtttacgagttttgtcctcgctcattgaattatcggccgctattatcatgcttttgacaaacgacatcagaaaggcggttgtggtgaatagtattttggcaatcgtcggcccgctgatctttatcatcacaatgacgatcggcatttatcagattgccggacagctctcatatgcaaaattaatattgatttttgcgggagtggtgctgattttggccggtgtgcataaatagagggccggggtgtcataaagtctgtcccggatcatacattttaaagaagccaatcggtaaaaaaggaggagactctattgaatgagattacagaggttctccctgaattattgagagatgccatctccgctgtgcccgaagaagcgagacgggatacagaagaaatcagaatccgcgtcgacaggccggttgaactgatccaaaaaggacaacctttgtatttgtcatatgtctgtacggccggcgacgcacagctgatcctcagccggctcagcaattacagtatgtacacgctggaagaagagctgaaaaaaggatatatcacaatcagaggaggccaccgtgtggggctggccggaagagtcatcgtcgaaaacggagccgtcaaaggactccgggatattacttcttttaatatccgaatcgcccgggagaagctgggaatcgcagaaccgctcattcctttcttatggaaagaaaactggctgaatacgctgatcatcggtcctccgcaaacggggaaaacgaccttgcttcgtgatttggcccggctttccagcaccggatcaaaacgcattcccgcaaaaaagacaggtatcgtagatgaacgttcggaaattgccggctgcctgcggggcattccccagcacagtttcggccgcagaatcgatgtccttgatgcctgtccgaaggcggaagggctgatgatgatgattcgctctatgagtcctgatgtcataattgtggatgaaatcgggagaatggaagactcacaagcgctgctggaggcgctccatgcgggcgtatccgttatcgtatctgcgcacgggtggaatatgaaagacttggtaaagaggccgtcgctgaaaatgctttgggaggaaaacgtgtttgaccggtatgttgaactgtcaaggcgccgcggtccgggaacgatcagcaggatgtacggaaaggacggggaacctgttccgcatgctgaaagcgtgatgacatgctgaagcttttgggtgccgtgtttattctgacagcgacgacttggaccggatttgagatcgccaaaatgtatatagaaaggccgaggcagatccgtcagctgcgcgcggcgctccaatcgcttgaagcggaaatcatgttcgggcatacaccgctgcataccgcctcgggacaaattgccgcacagctttccaaacctgtatcgttattgtttcaagctttcagcagaaggcttgagcagggaagcgattccgccaaaacggcttgggaacagagcttgaaacataattggtcgtccatggcgatgaaaaaaagcgaatatgatgtgctgaagcaattcggagagacgctcgggctccatgaccgtgtttctcagcagaaacatatcaagcttgcgcttacacatttggaagcggcggaagcggatgccggacgggcgcaggcgaaaaatgaaaaaatggtgaaaagcttaggatttttagccggactgttactcattcttctattgatgtaaacatgaggggagcaaacataaaatgggagtcgacgtaaatgtcatttttcaaatcgccggagtcggtatcgtggttgcgtttctgcacaccatacttgatcaaatgggaaaaaaagaatacgcccagtgggtgacgctgcttggctttatctatattttatttatggtggcgacgattgtcgatgacctgttcaaaaagatcaaagctgtgtttctattccaaggataggggggcttacagattgagattgttcaaattgtaggtttaggcctgatcgccacatttctctccctgatcgtaaaagaacagaaaccgactttcgcgtttatgattgtcgtcttcagcggctgcgtgatctttctttatctcatcgaccagatttacgacattatcagaatgatagaaaaaatagccgtcaatgcaaatgtcaatatggtctatgtggaaaccattttaaaaattatcggcatcgcctacatcgctgaattcggagcgcagcttacaaaggatgcgggccagggagcgattgcttcgaaaatagagctggccggaaaaattttgatactggtaatggccgtgccgatactcaccgtcattattgaaacgattctcggacttattccttcttgattataaataaaatggaaaggggggggcacaaaaaatgaagcgctttcggtgggcgggagcttttttgttcatcctcttattttttcagactgaatgtgtacaagctgccggaacagacggtgcgtcgcaggaaaccgcagttcaccaagaatccgctgatgaagtggcgaaaaagcaggccgaagcgctgaaaacagaaggcatcggaaagttttgggacgacatcatgacagaatacggcggtcttctgcctgaaagccaaaagggaagcatcgtcgactttattaacggagaaaaaacgttctcgccggaggcatggctgaaggctttattttcatacgtgtttcatgaagtgctcgcaaacggaaagcttctgggaactttgattcttctcaccattttttgtgtcattctgcagctcctgcaaaatgcgttccagcagagcaccgtcagcaaagtggcttatgcaatcgtctacatggtgctgattattctcgctttaaacagctttcatgttgccgttaattatgccagtgaagcgatccagacgatgacaagcttcattctcgcgctcatcccgcttttacttgcgcttttggcgtcttccgggggagccgtttccgcagctttttttcaccccgttattttatttctgatgaatacgagcggccttctcattcaaaacatcgtcatgccgcttatcttcctgtcagcgattttaagcatcgtcagcacgatgacggatcaatataaagtcacgcagcttgccaatctgctcagaaatatcgcgatcggcgcgcttgccgtatttctcaccgtgtttctcggcgtcatctccgtacagggggcttcggctgccgtgacggacgggattactctcaggactgcaaaatttataacaggcaattttattcccgtgctcggccggatgtttacggatgcgacggatacggtcatcagcgcctcgctcctattaaaaaacaccgtgggaatcctcggagtcggaattttgatctgcatctccgcgtttccggcgatcaaagtgctctcgctcgcttttatttataagctcgcggccgctattctgcagccgctcggaggcgggcccgtcattacgtgcctcggcgtcatcagcagaagcgtactgtatattttcgcggcgctcgccatcgtctctctcatgtttttcctcagcatcacagtcattattacagcaggcaacctcaccatgatgatgaaataaaggaggcccattggatatgagctttttaacagaatggctgacaagcattattttatttatcttattcgccatcgtcatcgacatgctgctgcccagctccagtatgcaaaaatacgcaaagatggttgtcagtctgctgttaatcattgtcatgctcaacccgatattcaaacttttcaaaacagacccggaaatcatcttcgattatttgacaaaacaagagcaatctcaatccgctgatataaaaaatcaaattaaatcagaaaaaaaagaaatacaagcatcaaaccgcgcatatgttttagaagaaatggctgtccaactaaaaaagaaagcggaggagatgttcagtcatgacgaatacaaaatagacgacatccgccttacagcggaagaacaggttcgttcagaagaagatgtaaaaacgatcagcgtgtatatggccccatcttctgaaaaaaccgtgcaaaccgtcgcaccgatcgacatccgcacagaccgcaaatacgaaccggaaggcgcagccgacaaaaaagaggccgcagacatcaaagaaaaacttgcggatatatgggaaatcggcagtgagaaaattacggtttatatggaaggcggggagaaaaacggccatgaataaaaacggactatggaccatactcaaaaaacagctgatgatcggacaggcgaaagacggagaaaaaccaaaactgacaaaatatcattactttctgttcgtgtttgtgctcggggtatcttttatgctggtgagccagctgttctcttcaccggagaataccgggaaggaccaagcggtgcagaccgtcatgtccggccgaacggaagacaaaagcgggcaaaaaagcgcacccgtttttaaggcatcgaaagacggcagcgcaaaaaccacgatcgatgattacgaaagagactatgaaaaccagctgaaagaaatccttgaaacgattatcggcgtggaggatgtctcaattgtcgtaaacgtagacgcaacatctttgaaagtgtttgagaaaaataaaacgaaaaaagacaccaccactgaagaaaccgataaagaaggcggcaaaagaagcgtaaccgatcaaacctctgaagaacaaattgtcatgattcgaaacggggaccaggaaaccccggtcgtcgtccagacgaaaaagcccgatatccgcggtgtactcgttgtcgctcagggagtggacaacgttcaaataaaaaaaaccatcattgatgccgtcacaagggtgctcgatgttccgagctatcgtgtagcggttgcccctaaaaaaatcaaggaggattcataaatcatgctgaaaaaacaaacggtttggcttttaacaatgctcagtctcgtcgtggtattaagtgtttattatattatgtcgccggaaagcaaaaatgccgtgcagatgaaaagcgaaaaaagcagcggagaagtcgccactgaaaaaacgccggctcctgaaacgaaagataagagcggaagcggcacggaaaaagaagacggcacaaaaggaacgaaagattctaaaggcacaaaagaggataaagaaacatcagccgaagcttcggacaaagacggatcggtcgccacagaaacagctgatgaaaacttatttaccgcataccgcatggagcttgaagacgcgagaagcaaagaaagggaacagttaaacagcattgtttcaagcgatgatgcgaccgcaaaggaaaaaagcgaagcctacgataaaatgacggcgctgagcaatgctgaagggacggaaaaacagctggaaacgctgattaaaacacaaggctacaaagatgcgctcgtggatgctgaaggagacaaaatcaacattaccgtcatgtctgacaaacattcaaacgcaaaagcttccgctatcattgacctggtggaaaaagaaatcaagacgatgaaagacgtcgccgtcacgtttgaaccgacaaaataagagacctgaaccgcccgcacccgctgcgggcttttctgatgtcattttagatcagtgttgaatttacacaagcgctcctgtaagataaacatagtatgtacttttagtagcaacccataaatttctattttttatacataggagtggaaactgatgttaaaaatcaacgaaattcatgaactgataaaaagaatcgatgaatcttccatcgacgaatttgtttacgaaattgaaggcgtaagcctcaaactgaaaaaaaatgaagcgccggcagtgaatgtaacgggacaagcccaagccgttcccgccgcttacgcacctgctccgcaggctgcaaaaccggaagcgagtgaagccgctcctgctcaggaagcgccgaaacaagacgaaaacctgcacaaaattacgtctccgatggtcggaacgttttatgcttcttcatcgccggaagccggcccttacgtaaaccaaggttcaaaagtgagcgaaaatacagttgtttgtatcgtagaagcaatgaaactctttaacgagattgaagccgaagtaaaaggagaaatcgttgaagtgttagttgaaaacggccagctggtcgaatacggacaacctctatttcttgtaaaagctgagtaaggagacctgctattatgattaaaaagctattgatcgccaaccgaggagaaatcgccgtcagaatcatccgggcctgcaaagagctgggcattgaaactgtagccgtttattctgaggcagataaagacgccctgcatgtccaaatggccgatgaggctttttgtatcgggccgaaaacatcaaaagaaagctatttaaatgtaacgaacatcgtcagcgtcgcaaagctgaccggcacggatgcgattcatccgggatacgggtttttagctgaaaacgccgactttgccgagctgtgcgaagaattaaacgtaacgtttgtcggccctacggctgacgccatttcaaaaatgggaacaaaagatatcgcccgcgacacgatgcagctggcgggcgtgccgattgtgcccggttcaaaaggaatcataaaaaatacggaagaagcggtttcgcttgcaggtgaaattgggtatcctgtcattataaaagccactgcgggcggaggcggaaaaggcatccgggtcgcacgcacagaagaagaattgatcaaaggcattgagattacccagcaggaagccgctacggcattcggaaatccgggtgtgtacatcgagaagtacatagaagatttccgccatgttgaaattcaggtgcttgcggataattacggaaacacgatccatctcggagagcgtgactgttctatccaaagacgtctgcaaaaacttcttgaagagtcaccgtcacctgcgcttgattctgaaatcagggagcagatgggtgaagcagcggtaaaagcagcgaaggccgtcggttacacgggagccggcacagtagaattcatctatgactacagagaacagcgctactacttcatggagatgaacacgcgtattcaagtagagcaccctgtcacagaaatggtgacgggaacggatctgatcaaagaacagatcaaagtggcatccggacaggagctttcgctcagacaggaagatgttgaatttaacggctgggcgattgaatgccgcatcaacgctgaaaaccctgcgaaaaacttcatgccttcacccggtaaaattaacatgtacctgccgccgggcggactcggtgtacgcgtggattcagccgcatatcccggctactcgatcccgccgtactatgacagtatgattgctaaagtcatcacatacggaacaacgcgtgatgaggcagtcgcacggatgaaacgcgcgctgagcgaattcgtgattgaaggtattgaaacgacgattccgttccatttgaaactgcttgaacacgaaacatttgtcagcggagagtttaatacaaagtttttagaaacatatgatgtaatgggctcataatttttgcgggaggtgaattgaatggaagacaacagtgtgcttaaaatggatcatgatgaggctcatttaggcaaggttgaaattgctcctgaggtcattgaagtcattgccggcatcgccgcttccgaagttgaaggagttgctgaaatgcgcggcaatttcgccacgggcgtcgtagaacgcttcggcaaaatcaatcacggcaaaggcgtaaaggtcgatttagccgatgacgggattaccatcgacgtctattgcgtcgttcaattcgggatctcgatcccgaaagtggcggcaagcgttcaggagaatatccgccaaaccttattaaacatgacgtctctgaccattaatgaaatcaatattcatatcgtcggcattcaatttgacacgaaagcccaagaagtcgaaatcgacgaagaaatgtaatgagcgtataaaaaccaaggggatgggcagccctttggttttttatacgtttcccgtcatttcaggcatgaagaaagccggcttacaaacggcagccgagtttcttcatgctgtgaaatccgaatgaaattaatgcgttttgtgaaaatattcggcattagggtaaaaaacctaaatttcgacatgcgattgagaaaaaaatatgttatgatctctttaagcttaacgacaagcggataaagcggatctgaaggagaaagaaaatgaaaagaagaacagctagagaaaaagctttgcaggcactttttcagattgatgtcagcgatattgcaccgaacgatgccattgagcacgcgcttgatggtgaaaaaacagatgccttctttgaacagctggtgtacggagtgatcgaacatcaggttcagcttgatgaaatgatttccggccatctcgtcaattggaagcttgaccggattgcaaacgtagaccgcgcgatcctgcgtctggcggtgtatgaaatggtttattctgacgacattcctgctaacgtgtcattaaacgaagcaatcgagctggcaaaacggttcggcgacgataaagctgcaaaattcgtaaacggggttctttctaacattaaaactgatatcgaatcataggaggaaagaaaatgactgcaacaatcatcgacggaaaagaaacggctaaagaaaaacgcgaacaattggcaaaagaagtagaagagctgaaagcacaaggcgtagtgcctggcttggcggtcattttaatcggagacgatcccgcttctgtttcatatgtgacaggcaagaaaaaagccgctgaaacaatgggaatgaaatttaagcttgaccgctttgactcaagcttaaccgaggcggagcttttaacagtgattgatcagtataatcaaaatccggaattccacggcattctcgtccagctgccgctcccggatcatatttctgaaaaagccgtaatcgagcggatctcccctgataaggatgttgacggtttccaccctctcaacgtcgggaaaatgctgcttggcgaagatacatttcttccatgcacgccgcacggaattgtcgagttattgaaaaagacgaacgtagatctttccggcaaagaagttgttgtagtcggacgaagcaatattgtcggtaaaccggtcggccagctgctgctgaacgaaaacgcgaccgtcacatattgccattcccggacgaaaaatatgtctgagcatacgaaaaaagcagatattcttgtggtagcggtcggtaaagcgaacttcatcaaagccgatcaaatcaaagagggcgccattgtcattgatgtcggcgtcaaccgtctcgaaagcggaaaactttgcggagacgttcagtttgatgaagcgaaagaaaaagcatctttcattacgccggtgccgggcggagtaggtccgatgaccatcacaatgcttgcgcataatactgttaaatctgccagacgtacgttatcatagataaccggagacagtcacaaaaagtgtgacaatgagcacgatacccgcttcttaaggctcctttcagccagagcgggttttcttagtttagggcaaaaagcctttatgaaaggagtgcaggatgtgagtgaagcggcatatgtcacggtttccgcgctgaccaaatacattaaacgaaaattcgatgtggaccctcatcttgaagacatttggattaagggtgagctctccaatgttaaaattcatacgagaggccacatctattttacattaaaagatgagcatgcccgcatgcaggccgtcatgtttcagaggcaaagttcgaggcttgcgtttaagccagaagacggaatgaaggtcatcgtaagaggcggcatctccgtctatgaaccgagcggaagctatcagctgtacgcgaaagaaatgcagccggacggtgtgggggcgctctacttagcatatgaagaattaaagaaaaaacttgccggcgaagggttgtttgatgaccggcataagcaggccatccccgcttttccggccacgatcggggtcgtcacgtcaccgacgggagcagccgtcagagacgtcattaccacactcaaaagaagatacccccttgtgaaagtcattgtgcttcccgcgctcgttcaaggtgaaaatgccagcagatcgattgtgaagcgcattgaagaagccaatgcacaaaaaatgtgtgacgtcctgatcgtcggaaggggagggggctcgatcgaagaattgtgggcatttaacgaagaaatcgtggcccgggcgatttttgcttccgccattccgattatatcagccgtcggacatgaaacagattttacaatcagtgatttcgtcgcagatatccgggcggcaacgccgacaggagcggcagaaatcgccgtcccccacacgacggacttaatggaacggacaaaaacggcggaagtccgcctgacaagagcgatgcagcagcatatcagcaagaaaaaagaacgggttcaatcgctccagtcatcctacgcgttccgttttccgaaacgattgtatacccaaaaagaacagcagtttgaccttttgtatcagcagttccaatcacagctcacggggcttacggacaggaaacaaaggcagctggagcggaatacgtacagattaacggcgctccaccctgaaacccagctgaaacaggcgaaaaaacggtacgaggagcgctcaaatcagctcgcccgaagcatgaatgtccagctgaagcagcttcattcgcagtttcagacggttcttggtaaactgaatgcattaagtccgcttcaggtgatggagagaggatacagcctggcctataaagacaaagagctgatcaaaagcgttgatcaagtggaacaaaatgatacgctagaagtaaagatgacagacggcgttctgacgtgtgaagtattgcaaaagagaggcgaacgataatgacagaaaccaaaaaaagtgaagagctgacatttgaagaggcgatgaaaggccttgaaggcattgtggcaaagcttgaagaaggagacgtgccgctggagcaggcgattaattattttcaggaagggatggccctttcaaaaatgtgccatgaaaagcttcagcatgttgaaaagcaaatggactttattttaaaagataacggcgaacttgcacctttcagcgttcaggaggaagacgaaggtgacaaataaactggacgcatttttagcatcgcgcaaacaactgattgaacagcagctttctttgtatacagaacggcttgcgatgccggaaaccctcaaaaaatctatgctgtattctttggaagcgggcggaaagaggctgcgccccctcgtcgtcttagccgttctgaatgcttacggaaaagatgaaaaagacgggattccggtcggatgcgctgtcgaaatgattcatacgtattctttaatccatgatgatctgccttgcatggacgatgatgatctgcgccggggaaagcccacaaaccataaagtcttcggagaagcggcagccgtattggccggagacgggcttctgacagaaagctttaaactgatcacatctcatgtgtctgaggcggtttcagcagaaaaacggctccgtctcgtcgatgagctgatcagcgcggcgggaacggaaggaatggtcggcggacaggctgccgacatggaagcggaacaaaagcggataacgcttgaggagctggaatccatccacgagcggaaaacggccaagctcctcggtttttccgtgacggcgggcgccattttggcagatgcgccggaggatgaagtcgaaaagctccgtctgttcagcagccatatcggcatcggattccaaatcagagacgacatccttgatattgaagggcatgaggagaggatcggcaaaccggtcggctcagacacgtcgaatgaaaagtcaacgtatccgtcgcttttaacgcttgaaggcgcgaaagaaaagcttgcgtatcatataagcgaggcgaaacagatcatcagcggcctttctcttcagaaagaattgctgcatgacctctgtgatttaatcgcggcgagagatcattaaaaacggtcctgatttgaaggggctgccgctcctatggtaaaatgtaagcagtttcgatgaaaatacaaagggagtctttttcttttttcaaaaagacactgtttaatttgcagaaattcatgctgaaagtgagttgatccgctttggatcttttatcaatacaggacccgtcatttcttaaaaagatgtcaattgaacagctggaagagctgagtgaggagatccgcaatttcctcatcacatcgctgtctgcctctggcggccatatcgggccgaaccttggggttgtcgagctgacaattgcgcttcacaaagaatttgacagtccgaaagataaatttttatgggatgtcggacatcagtcctatgttcataaactgttaaccggacgcggcaaggagtttgaaaccttgcgccaatataaagggctttgcggtttcccgaaacgcagcgaaagcgaacatgacgtatgggaaacagggcacagctcaacctcgctctcaggcgcgatgggaatggctgccgcccgtgatattaaaggatcgaaagaatatatcatcccgattatcggagacggcgctttaaccggaggaatggcgcttgaagcgctgaaccatatcggtgatgagaagaaagacatgatcgttatcctgaatgataatgagatgagcattgcgccgaatgtcggggcgattcattctatgctgggacggcttcgcacggccggcaaatatcaatgggtaaaagacgagcttgaatatttatttaagcgcatcccggccgtcggcggaaaattggccgccacagctgaacggataaaagacagtttgaaatatatgcttgtgtcaggcatgttttttgaagagctgggctttacgtatttaggcccggttgacggtcattcctaccacgaactgtttgaaaacctgcaatacgccaaaaaaacgaaaggccctgtcctgttacatgtcattacgaaaaagggcaaaggctataaaccggctgagaccgacacaatcggcacatggcacggaacgggtccttataaaatcaatacgggtgatttcgtcaagccgaaagccgcggcgccttcatggagcggacttgtcagcggcaccgtgcaggagctggcgcgcgaggatgacagaattgtcgcgattacaccggccatgccggtcggctccaaactggaagggtttgcgaaagaattccctgaacgcatgtttgatgtcggaatcgcagaacagcatgcggcgacgatggcggctggaatggcgcttcagggtatgaagccgtttcttgcgatctattcgacctttttgcagcgggcgtacgatcaggtcgtccatgacatctgccgtcaaaacgcgaatgtgtttatcggcattgaccgcgccggtttggtcggcgctgacggggagacgcatcaaggcgtctttgacatcgcctttttgcggcatataccaaacctcgttttaatgatgccgaaggatgaaaatgaaggccgccatatggtcaatacagcccttaattatgaggagggtccgatcgcgatgcgcttcccgcgcgggaacgggctcggcgtaaagatggataaagagctgaaaaccattccgatcggaacatgggaagtgctccgtcccggaaaagacgcggtcattttaacattcggtacgaccattgaaatggcgctggaagcggctgaagaactgcaaaaagaaggcctgtccgtgcgtgtcgtgaatgcgcggtttataaaaccgattgataaacaattgatgaaggccattcttaatgaaggtctgccgattttaacgatagaagaagccgtgcttgaaggcggattcggcagcacgattcttgaatacgctcatgacctcggcatgtatcatacgccgattgacagaatgggcatcccagaccggtttattgaacacggcagcgtaaccgccctgcttgaagaaatcggtctcacgaaggctgaggttatgaaccggatcaaactgctgatgccgccgaagacacataaaggaattggatcatgacagcaaaaaaagaacgattagatgtacttcttgtagaaaaaggccttgcggaaacgcgggaaaaagcgaaacgcgccattatggcgggcatcgtatactcaaatgaaaaccgattggacaaaccgggtgaaaaaatcgcccgggatcttccgttaacggtaaaaggaaaccctcttaaatacgtcagcagaggcggattaaagcttgaaaaagctctggaagtgtttcccgtctcggtaaaaggcaaaacgatgattgacatcggctcgtctacagggggattcacggattgcgccctccaaaacggagccgagcggtcctacgcagtggatgtcggctataatcagcttgcttggaagctcagacaggacgagagggtcgtcgtcatggaacggacgaatttccgctattccgagccttccgatttcacagagggtttgccggaatttgcgacaatcgatgtttctttcatctcactccgcctcattctgccggttttaaaaacgctgcttgtaccggggagcgattgtatcgcactggtgaagccgcaatttgaagccggacgggaatccgtcggaaaaaaaggcattgtcagagatcccggtgttcatactgacgttctccgccgcatgaatcaatttgccgcttctgaaggatatacagtgaaaggactgtccttctcaccgattacagggggagacggcaatattgagtttctgcttcatttggaatggggcggagaagacggaaacggcgctgaactgccggaagaagacattctccgtaccgtccgcgaagcacatgagacattaaaagccaaaaagacagatgtaccggaataatagggggctattattccttttttctgccatcatgtactttttatcaagaagcggttaacataatgacaagaacagcttgaaaacagaggtgcttacatgacaaaaggccaaaggcatataaaaatcagagagcttattacaagccatgagattgaaacgcaggatgacttagttgacatgctgagagaagaaggatataaggtaactcaggcgactgtctccagagacattaaagagctgcatctcgtaaaggtgccgacaaacaacggctcctacaaatacagcctgccggcggatcagcggttcaatccgctgtcaaaactgaagcgttcattaatggatgcgttcgtaaaaattgactcagcaagccatatgatcgtattaaaaacgatgccggggaatgctcaggcaatcggcgctctgatggataatctcgaatgggaagaaatcatgggcacgatttgcggagatgacacgatcttaatcatctgcaggacgcctgaagatacggagggcgttcaaagccgtcttttggagctgctgtagcgtaattatcagataaaaggtggaatgctgtttgttagctgaactatcaataaaaaactttgccattatagaggaactgacgatttcgtttgaacgggggctcaccgtcctgacgggagaaacaggggccggcaagtcaattattatagacgccgtttccctattagtcggcggccgcggctcgtctgaatttgtccgttacggtgaaacaaaggccgagcttgaaggactgtttcttttggacagcggtcatcccgtttttgaagtatgccgtgagcagggaatagacgcatctgacgacatgattgtcatgagaagggacatcaatgccggaggaaaaagcgtctgccgtgtcaacggaaaattagtgacgattgcggctttaagggaaatcggcagacttttattagatattcacggacagcatgataaccagctgttaatggaggacgacaaacacttggagcttttggataaatttgcgggtgctgaggccgaatccgcgcttcaggcttaccatgaaggctatgagcgttatatgaagctgctcaaaaaagtgaagaagctgtcagaaagcgagcaggaaatggcgcatcgattagacctgattcaatttcagcttgaagaaatcgagtcggcgaagcttgaattgaatgaagacgaacttcttcaggaagagcggaagcagatatccaactttgaaaaaatttatgaatcattgcaaaacgcctataatgcgctccgcagcgagcagggggggcttgactgggtcggaatggcctctgcccagcttgaagatatttcggatatcaatgaaccgctgcaaaagctgtctgaaagtgtgtcaagttcctattatctgctggaggatgcaacctttcagatgcgcaatctgttagatgatctggaatatgacccggaacggctgaattttattgaaacccgtttaaatgagatcaaacagctgaagcgcaaatacggagcgacggtagaagacattttggaatacggctccaaaatagaagaggaaatcgatcaaatcgagaaccgcgacagccaccttgaagcgctgaagaaggaattggagtcggtcggcaaagatgtggccgtagaagccgccaatttatcaaaaatcagaaaagcatgggctaagaaactggcggaagcgattcatcaggaattaaaaagtctgtatatgggcaaatcaacgtttgatacggaatttctcgtgaaaaccgatccgtcagccagtgaagcaccggttgttaacgggcagcccgtgcagcttacccaaaaggggattgaccttgtgaagtttttaatttcaacaaacaccggtgagcctttaaaaccgctgtcaaaggtcgcttccggaggcgagctttcaagggtgatgctggcgatgaagagtattttttcttcccagcaggatgtcacctccatcatctttgacgaagtggacaccggtgtaagcgggcgggttgcccaagccatcgcggaaaaaatccataaagtatcgaccggttcacaggtgctctgcattacacacctgccgcaggttgccgctatggcggatacgcaccttctgatcgcaaaagaattcaaagacggccggacgacaacgcatgtcacgccgctttctaaacaggacaaggtagcggaaatcggccgcatgattgcgggcgtcgaagtgaccgatctgacaaaacggcatgcacaagagcttttaaaacaggccggacaggtaaaaacgacaggataagctgctgatacaggcagcttatttttttgttccatttctctaacagtgtatccaatgtttttcttcgtatgccggttataaatcaagcgcaggaaggcaaaagtatagatgtagcagaaaaagaaagtggtgtgggataggagcgaggagagtgaaggaatgaatgcacgataacatgaggaaagcaataggtgtaattctccttgtttctttactaagtgtaggcttttttaagccatttaaagaatatttactgataccgtcagaaatgagcgtctttgaaaaccagacacaggccgttccggttaatgcatcaataagcgctgaaaagggcgaattatcagaagcctttacgctgaaagaagagcacggccatgcaaacataacagggcaaacacaaggccggtcagaagtagtatatgatcttgccggatttcccattaaaaaaacgaaagtgcgtgtccttccagaattgaaggtcattccgggcggacagtccatcggtgtaaaactgcattcagtcggtgttttggtggtcggttttcaccaagtgatgacaaaggatgggaaaaagtctccgggagaacaagcgggaattgaatctggcgacatcattattaaaatgaacggacataaaattgaaaaaatgagcgatatcgccccgtttattcaaaaagcgggcaaaaccggtgaatctttggatttattggtgaaacgcgataagcaaaaaatcaaaacaaagctgattccgacaaaggacgaagccgaggggaaatatcgaatcggcctttatatccgcgattcggcagccggcatcggcaccatgacattttttgaaccgaaaacaaaaaaatacggcgcattgggccacgtcatctctgatatggatacaaaaaaaccgattgttgtagaagacggagaaatcgtccgttcaactgtaacatcgattgaaaaaggaaaaggcggcaatcccggcgaaaaactggcaaggttttcgtcagaacggaaaacgatcggcgatattaaccgcaacagcccgttcggcatcttcgggacactgcatcagccgattaaaaacaacatttccgacaaagcgcttccgattgctttgtcaaatgaagtaaaaaaaggacctgcgcaaatgctgacggttatcgaaaacgataaagtagagaaatttgatattgaaatcgtcagcaccacgccgcaaaaattcccggcgacaaagggaatggtgttgaaagtgacagatccgaaactgctgaaaagaaccggcggaatcgttcaggggatgagcggaagcccgatcatccagaacggaaaggtcgtcggagccgtaacccacgtatttgtcaatgatccgacaagcggctacggcgttcatatcgaatggatgctgtctgaagcgggtgttgatgtttacgggaaagacaaagcaagctgactgccggatgatccggcagtttttttatgtgatgcgttcttcacttctttcctggattcatgtaaaataagacatgaagatttttcgacaaattcacgtttcctgatttgtcaaacttaatttttagtcgaaaaacctagaaaatgctagaaaaacaaagatataccactattattggtaaatatggattttttaaaaggggaagtagtggttttgtcgaatgtaacatgtagcagtcaaatgggttgcgtcctgttaatacattgggggaggaagaaacgtggagaaaattaaagtttgtgttgctgatgataatcgagagcttgtaagcctgttgagtgaatatatagagggacaggatgatatggaagtgatcggcgttgcttataacggacaggaatgtctttctttgtttaaagataagaatccagatgtgctcgttttagacattatcatgccgcatctggacggacttgcggttttggagcgtctgcgggaatcagagctcgagaagcagccgaacgtcatcatgctgacggcattcggtcaggaagacgttacgaaaaaagccgtcgatttaggcgcgtcctatttcatcctgaagccgtttgatatggaaaaccttgtcggccatatccgccaggtaagcggaaatgtcagcagtgtcacacaccgtgcgccgtctgcgcaaagcagcattatccgcagccagcctgagccgaagcggaaaaatctcgatgccagcattacaagcattatccatgagatcggtgtgcctgcccatatcaaaggctatctttatttgcgtgaagccatttccatggtgtataacgatattgaactcctcggcagcatcacaaaagtcctttatcccgacatcgccaaaaaattcaacacgaccgcaagccgtgtagaacgggccatccgccacgccattgaagtcgcatggagcaggggaaatattgattccatttcttcactgttcggatatacggtaagcatgacaaaagcaaagccaaccaattcagagttcatcgcgatggttgctgacaagctgagattggagcataaagcttcgtaacgcaagcttttggctagatgtctttttcgcgccttctcttccgtgcatgaacgcggaagagaaggcgttttgaaattttgctggcgaaaacaatggaaatcacccacgccggtacttgttctatacataaatgcgggatctatgccgtctacacgtataataccggagctgatattttaatgattttgccgtctctgaaataaaagcgggggacgcggcggcttaacacagataagacttcgtagctgatcgtaccgagcatttcggcaatttcatcaacggaaatctcggctcctttttgtttgccgtagatgacgacttcttctccttgtttgccctcattctcacctaaactgaccataatcatatccattgtcactctccccgccaccggcacccgtctgccgcggtgaagaataaacccgcggttggacagggcgcgggagtagccgtcagcatagccgattggaatcgtcgcgatgatttcacccggttcggcgatatatgtggcaccataactgacggtccggggctctgtcaccatggctttcacataagcgatacgcgcctttaaacttagtgcgggtgtgagatccacgaggttcagttcctttatcgaggcggacggatataaaccatataacccaatgcctaaacggatcatgtcggcgctgaattccgggaatgcgatagcggcggctgtattgcacatatgcacggtaggcagcgtaatgtcttgattttttaaaaagcggagaaagctgataaacttttcgtgctgcagcatcgtcagctcagtgtccggttcatccgctgttgaaaaatgtgtaaagatgccatcccatgacagatatgtactcgacttgagcgctttcaccactgctaaaagatcttcttccgtacgcacacccagccggcccattcccgtatccacattgatatgaatggacagccgtttcgaatctgcttctttttccaatatccgattcgcttttttgatccagctgacttgaaacgctgataatgttatgttccaaacggcagattttttcacacagctgagagctgtgaagccgagcacaagaataggtgccgtaattcccgctctccgtaacacaattccctcttcgacacttgcgacagcgagctcgctcgccccgctttccagtgcctgccgcgctacttccacagacccgtggccataagcgttcgcttttacgacggccataattttagacgtattcggaatatggcggcggatcgcccgtacgttcttttttatcgcatcaaggtcaacttcaatccaaacttcccggcaaagttttttcatcacgattccttctttccttaatgagtttcagtactcatgctttcaatctgcattctattcaccttgaactgaaatcattcaaaacaagggaaggtgatcgctgatgtttaaaaatcaaggtttcaggaaatcagtacgcctgctttatttatgctgaaagggctgcatggcagcccttaaattgacttcacaatattctgatctgaaaattgatgttcaaacattttggactggcttacagcattgttttgaatgacaatgccgatatttccccctcctgcaccgaaaacggtttttgatgcagtcagcggactgatggatatggcgccgccaacattgacaactccgtttcctgatacgttgtttatcgtaatcgggcaaccgctcattctattttttctcctttctctcacagtctactaactatatgtacgctgtgatatggaataagattaaacaaaacggcaaaaagaatccggctgctgccagccggaaagggagggaaatacggatgtcataatgttttcgttacattttgatcagagtattgagagcttgaagattgagatgtactggattgattcatttgcaggaccatccctgtatttcccccacctgagccgtagacggtttttgatacggttaaaggacttatcgaaaacgcaccgccgacattgacaaccccgtttccggaaagactgttaatcgtaataggaaaaccagccatcatatacggtctcctttctattaatctatttactatatgtacgctgtgtgttagaaataggagtaaacaaagcggtaaaaacttgtaaatcaaaaaaactgccggacatccggcagtttttttagtctacttttcaaacggcacccagccgcctgtattctgaatcatttcccataacggttcaggaagtcggtatttctcaatttcagatgcttgaatggctttttcgatttcctgttcgcggccttctttgaccagcaccgcccattcggggttaatcaaaatgacacgtcccagagccaccagcggaattccgctttctaatacagcaagcgcttcgtccgcggtatagatggaaccgacggccatcagcggcactttatggccgacgcgttcgtttaataaatccatccgcgtccgtgaagtatccgctccgcggcgggctttggaattgacatccatcagtgaaatatgcagataatccaagttctcttccgcaagcgcgtcagcgagcatggatgtttctttcattgtaagccccggtgtttccggctcttccggtgacaggcggtagccgagaacgaatggattttcagcgtgtgtatcaattgcctgtttgacagcgtcaacgactgcaagcgggaacgcaaggcgcttttcatggcttccgccccagcggtctgtgcgccggtttgttttcggtgaataaaattggtgaatcaggtacccgtttgccccgtgaatttcaacaccgtcaaagccggcttcaatcgctctgcgtgtcgcttcgccgaatgctttcacgatgtgctcaatttcttgttcggtgagagcccgggacgtttgtctcccgtcttcttctgagccgctcggactgacgacgtcgttgtttggcacgagttcaggagggcattccaatcctccgtggtgaatctgcacaacggctttcgctccttgagactggatcgcctgagcgagttttttcaagccgggaatgtgagaatcatcatagatgccgggctggcctggaaacgctttgccgtccggcgttacgtttgcacatgccgtaataaccatgcccatttcttttgaacggggagtaatgtagcttaattcacggtcggaaatcgttccgtcatcatttgatgaatagtgtgtcatcggtgcgactgaaatgcggtttggtatggtgacgccgctttcgaacgtaaaaggttcaaacagcggtttataagtttgcttcatcatttcgccttcttccttaggagtttaactcgtccgtattctagcttatgttttaattgtgtgcaattattttgcttgttcttcttcctgaagttatgaccggctgaaccatctaaacgaatgaaacggttttctccgttccttttcaggatctttatatcctcctgaaatttgatggccgatcgagctgaatatgacagcggcggcgaagaggagaatgatttttttcatatacatatcttctttcttatcttttacaaggttatttataagcatacgcttgtgcgaaaaaaccgtcaatttgtttttatttattcttttttccactttcctgcggcgaatatcgttccgatctgaatcacaacacttaacagagcgcacactgccacaactgtgttgctgtccatagaagacaccctcctttttgttaggttgatgtatcatatgacagctgtctctgttttgacaaaaccgtaatgcggtgtttcatatttttcaacacaaaaagggcgcttttttaagcgcctttacttttttttcagccggttcaaagcgatttgaacggcgatggcgtcatccaggtagccgatcggaaacatgtaatccggaatgacgtcggtcgctaaaatataatacagcagcgcgctcccgagaatcgcgcggtcttcagccggtgttgattcatccatatactgatgatgcatgtttttcaaatgatcaataaaagggccgacgctttcttcattgtccattttcttttgaaactcatcgcaaatcaggcgatggccctgctgggttttggcatattgttcatatctggtcagttcgcgctcaatttgctcccgggaaaaaggctgatcaaacatctcggccatattcagcatatcctgaatcgcgtgcatcgggtcttgcggcgcagcttctttttcatggccgatgtctatgcctgacgcctcaagcaattcctccagcggggtgcggagatgttttgaaaattcctgaagatgctttaaattggccttctgcttgccgtttataatccgggagatggtggccgtatcaatgtttgttaaggcgccgagttttctcatggagagcgagtgcttatcaagcagtgattttaaaaggggccccagtgtcgtatttttattttctgtcaagggtgtcacctcgtttccgccggaatgatgatcattaatcaataatttttgcagaaaaggtaccttttctgtgctgctgaataggatagtgtagattcaacggcacaacatgttgaaaagacatcaaagaatggagagaaacgaacatggcttggttattgattttaggtttggcagtgtcctcgagcattgataatttaggagtggggatgtcatacggcatcagaaaaatcaaaatatcgcatgcgtcaaatatgatgatcgcttttatctgttttgtattcagttatatcggaatttatttcggcaaatggatttcagccgtttcaccgggctttcttcctgtattgctggcggcgtttattttatctgtcatcggtatccgcatcattctgctggctgtgccgagaaaaacagcgcgtgttggcgcgtcaggaaaaaaaggccgttttgccggtctgctgcaaaatccggaggcagcggatgccgacggttcgggagaaatcggtatattggaatccatggttctcggggtggccgtatccgcaaatgcgctgaccaacggattaagcgcggggttgatcgggctttctcccgctgccatttccatcactgcggcggtcggaagctttttgaccatatggatcggctgctcgcttggaaaaaaagccgcgtcattgcgcatcggttcttttcatgtcggacagttcagcacggtgctgagcggagtgattattctcatcattgccgccaatacgctgctcttttaagttgtcccgttcattttatgaaaagctcaaaataaatatgaatgtttctattcgggagagcgcatgacgcggctctctttttttgccgatctgatattttttcaaaatgaacagaaagtcgtccgtttccgttaaattctgcatattcggccttcagacagaacttttttcatagactgattagcttgttttctttctaagttcaggtaaacagcaggtcagatagccttcgttccaaatatggaaaagcgctggaggaatggaggctccctttacaaatcggtcattctgttcaaagataaagccgaatgagaaaacgtgaggtgatctgtgtgaagtctgtcatacttctgatcttcaccgcatggctgttatcaggctgcgagtataccgtggaggctgatgcggcgccgtcatttacacaggaaggaacatttataaaagcggccggaaacgatacgatcgcggtcgaaattgacggagaaaggcaagaggtgaaggtgcctttcgctaagcggtttgaatgtcagtctctgcctgaacatacggcggtgcaaatcacctataaaaaagagagcaacggacaattacggcttgaggaactgaaaaaagaaacagatatgtgaaaacggggaggaaaaaacgtgggtttactgacaaaaagcgctgctgccttcggtgccgctcttcttctgcttgcgccgtctgcttatgcagctgaacctttgcaaggaaaaaccatttatatcgatgccggacatggcggagaagacagcggggccggcggaaatggactgcttgagaaaaacatcaatttagcggtgtcaaacaaggtgatcgccaaattggagacagaaggcgcaaaacctgttgcttcaaggactgacgatacttttttacgtttggacgagcgggtggcgaaagcaagcgccagccaatccgatttattcgtcagcctccatacgaattcagccgtctcaacggcatcgggcacggaaacgtattttaattcgacatatgaaggagcagacagcgaaaggcttgcttccgacatccagcagcagcttgtcacgtctttagggatgaaggacagaggcgtaaaagaagctcctttttatgtcattacatattcaaagatgccgagtgtgctggctgaattaggttttatcacaaatcctcaagatgcggacaagctgaaaagcgataacggacaagagcacgccgcggacgccgttgtaaagggaatcgaaacctattacagcggacagtaattataaaatatgtgtaaatagcgccctccttatgtgcataacgattataatagagaaaaccgatgacaaacacctgaggtgacacatatgacgaatatttttgcccaccggggggcgtcgggcgactgccctgaaaatacgatgcccgcattcaaaaaagcgattgaggacggggctgacggaatcgaacttgatgtacagatgacaaaagacggccggatcgtggtcattcacgatgaaaccctcgaccgcacgacgtctttgaaaggatttgtgaaagatacggcgtatgacaaaatcagaaccgccgatgccgccggaaaatggaaagatgcttttaaaggtgtcagaattccgcttttgtcagatgtgctgcgttttgcggaacgtggtgattttctgataaacattgagctgaaaaacagtgtattccgttacgaaggaatggaagaagaagtgattaaaaaagtcagatattacggactcgaaaagcgcgttattttttcttcatttaatcatgagagtcttgcggtttgccacgccttggcgcctgaaattgaacgggcggtgctgacaatggatgtgctgtaccggcctgaacggtatcttgccgccattcccgcttcgggttatcatccgaagctcggtacgccggcggtgagcgctgaagtgatcaaacatcttgcaaaacaccaagcggcgctccgtccgttcaccgtcaatcgtcctgaggatatgaagcagctgatgaaagcgggagcagacgcaatttttaccgattatccaaagctggctgtttctataaaagaagaatgccgcagctgagaagactgttcagacagtcttctttttttatgggcgggaaaaaggcggtgcactcataactcggtcagccggttcatatattgtaacagggcgttttgtgtaagcgttatcttttatcttattgaaagtgaggcaaaattgtgggaaaaacggttatcgtcagtgcggcaagaacgccgttcggaaaatttggcggcgcattaaaagaggtaaaggcagccgagcttggcggcattgccataaaagaagcaatcaagcgcgccgctatcagtgaaagcgaagcggaaggagcggtgatgggaatggtcgtccaggcgggtgccgggcagattccggcacggcaggccgcaagatatgccgggcttccgtggtccgttccggctgaaaccattaataaggtctgtgcatcagggctcagggccgttaccatctgtgatcaaatgatccgggcgaaagatgcggacgtgctgattgcaggcggaatggaaagcatgagcaacattccgtacgccattccggccggccgctggggtgtgaggatgggggacggggtgtttcaggatttaatggttcatgacgggctgacctgtgcgttcgaccaggtgcatatggctgtccacggaagcactgcggccaaaaagtacggcatttcccgggatgaacaggatcattacgctcttttgagccagaaacgcgcggctgaggcggccgaggcgggcaaattgcgtgaagaaattgtccccgtcacctggaccggcaaaaagggcaaacagcataccgttgaagcggatgaggggctgcgccctgatacgagccttgagcagcttgcagcgctcaagccaatttttacagccgacggaacggttacagccggaaacgctcccggtgtaaatgacggggccggagcatttgtgctgatgtcagaggaaaaagccgcgaagcagcatgtcaggccgctcgcagcgatacttggctttgcgtcagtcggactggaagcgtgcgagctggcaagcgcgccgggagaggccatcagccggctcttgacaaaaaccggactgtccgttgacgatattgatttgtttgaagtaaatgaagcatttgcgtccgtcgtgctcgtgagtgaaaaaatagccgggttcagccgggaaaaagtgaatgtaaacggaggggcaatcgcgttcggccacccgatcggcgcaagcggagcgagaatcatcatgagtttaatatacgaattaaagcgtcgcggaggaggtttaggcatagcggctatatgcagcggagcggctcaaggagatgccgtcctgcttgaggtgtactgatcaaaggagggagcgccggatgaaaatgaaaacaatcatggtcgcaggtgccggtcagatgggagcaggcatcgcgcagacggctgcagaagccgggtttgccgtcatgttatacgattgggagccggaaacggtaacaaaaggtcttcaccgcataaagacaaacctggagaaagagcaggcaaaaggacggaagtcacggcaggagacagatgccgttttcagccgtatttccccggcagaactcacagaagcgggagatgctgattttgtaattgaagccattgcagaaaacaaaaaagcaaaagcggaattgtttgacacactagataaaatctgtccccctcatgccgtattggcaagcaatacgtcttctcttcccattacggagcttgccgcggccacaaaaaggcctgaaaaagtaatcggcatgcattttatgaatccggttcctgtcatggagcttgtcgaagtcatcagaggactcgccacatcggaagaaacggcggaaacagtaaagaagcttgccgtccggatgaataaaacccctgtcgaagtcaatgacttcccgggctttatatctaatcgcatattaatgccgatgattaacgaagccgtttattgcctttacgaaggagcagcttcaaaggaagccattgatgcggtgatgaagctcggcatgcggcatccgatgggtccattaacattagctgacttcatcgggctggatacgtgcctttccattatggaggttctctatgcggggctcggagatccgaaataccgcccatgccctctgctcagaaaatatgtcagcgccggctggctcggcaaaaaaagcgggcgcggtttttatgagtacggcagatgacgtaaagatcatgaggggagacggcagccatgcattttacagaagagcacatcatgatgagaaaaatggtgcgtgattttgcccgcaaggaaatcgcgccggtggttgagctcatggaatcaacagatgaatttccggagcggctgattaaaaaaatgggcgaagcgggattgatgggcattcccgtcccggaaacttacggcggggcgggtgctgatacaacatcttacattttagcgattcatgaaatatcaaaagtcagcgcggccgtcggcgtcattttatccgtccacacatcggtagggacaatcccgattttgcatttcgggacagaagcccaaaaacaaacgtatattccgaagctggcagcgggcgaatatattggggcttttgcgcttactgagcctcaatccggatctgatgcgggcagcctgaaaacaacggccgtgcgaaaaggcggttcatatattctgaacggttcaaaaatctttattacaaacggcggagcggcagatctgtatctgacattcgccataaccgatccgggtaaagggagaaagggaatttcagcgtttatcgttgaaaaaaacacacccggtttttctgtcggaaaaaaagaaaaaaagctcggactgttaggttccaatactgtcgaattgcagtttgaccaagcggaaattccggttgaaaaccggctcggcgaagagggtgaaggcttttcaatcgccatgaaaaaccttgacgtcggacggatcggcatagcggctcaggcgctcgggattatcgaagcggcgctcggctgctcggtggagtacgccaaaacccgcagccagttcggcagacccatcgcttcgaatcaggccgtttcatttaaattatctgacatggcgacgaatgcggaagctgccaaattattggtctatcatgctgctgatctgtatcagcgagggcttccgtgcggaaaagaagcatctatggcgaagcaattcgcgtccgatgcggcgatgaaagcggcggtggaggctgtgcagattcacggcggctacggctatatgaaagagtatcccgcggagcgtttatttcgggatgcgaaagtcacgcaaatctatgaaggaaccaatgagattcaaaggctgattatttctaagtatcttcttcaataaaaagtgcgcaaaggagcgaaaccatggaatcttattctcccggtttagatggcgtcatagcggtggaaacggggatttctttcctggatacacagcagggcagtattttaatcaaaggccacgatctgattgagctttctaaaacggccggctatatggacattgttcatctcttattggaagacagacttcctgatgcgaaagagaaggcggcgcttgaagaagacgttcggcgcggcgggcaccttcccgaggaaatcttgcacatatgccgtctgctgcctgaacatactcacccgatggacggactgaggacgggtttgtccgcgcttggaggctttgacaaggacatcgatgaccgttcatcttccgtaaatcagcaccgcgtacgcggactgataggcaaaatgccgaatctgacggtcaacagctatcgagtcatcaacgggctggagcctttggcgccggtcggaaccttatcatacagcgcaaactttttatatatgattaccggaaaaacaccgtcatctttggaagaagaaatcttcgacaggtcgcttcttttatacagtgagcatgaattgccgaactcaacgtttacggcccgtgtcatcgcttcgacgcaatcggatatttacggcgcgctgaccggagccgtcgcctcgcttaaaggaaaccttcacggcggcgcgaacgaagcggttatgtacatgcttgaagaagcgaaggatacagacgggtttacacaattattaactcaaaaactcgcaaataaagaaaaaatcatgggcttcggccaccgtgtctacatgaaaaaaatggacccgagggcgctcatgatgaaagaagcgttaaaaaagctgtctgatctttcaggtgatttccgtctttatcatatgtgtgaagccggcgaaaccgtcatgcgggagaaaaaaggcctttatccgaatttagattactacgcagcgccggtctattacatgctcggcatcccaataccgctgtacacgcctatattcttcagcgcacggacggtcggactgtgcgcccacgtcattgaacagcacagccgaaaccggcttttccgcccgcgtgtccgctataccggagcgcgcctgtaaacagatgagaaaggaagatgaaaacatgacagaaccccgccgaatggacgctgtaatcgaagagatttctgactacgtgctccatcaggagattgacagttcagaagcttttactacggcaggacatgtgcttcttgatacgataggctgcggaattttggcgctcagctatcccgaatgtacaaagctgctcggcccgattgtcccgggaacctccgtgcccaacggcagcagagtcccgggcacgccttttgttttagacccggtcacggctgcttttaatatcggctgtatcaacaggtggctcgattataatgatacgtggcttgcggcggaatggggtcatccgtctgacaatctcggaggcatattggcttgtgcggattatatatccagagtgcggatttcagaagggaaagaaccgcttaccgtgcgcgatgtgctttgcgcaatgatcaaagcgcacgaaattcaaggaattctcgctttggaaaacagcttaaacagagtggggcttgatcatgtgctgtttgtgaaagtggcgactgcggctgtttgcgcacaaatgctgggcggctcaagagaggaaatcaataacgccgtatctcacgcttggattgataattcaagcctcagaacgtatcgtcatgcgccgaacaccggatcacgcaaatcatgggcggccggcgacgcgacgagcagaggcgtatatttggcccttatggcgcaaaaaggtgaaatggggtacccgacggctctgaccgcatctgggtggggatttcaagacgtattgtttaaccggcaggaaatgaagcttgcccgcccgcttgggtcctatgtgatggagaatgttttgtttaaagtatcctacccggctgaattccacgcccagacagcggcggaatgcgcggtccggcttcatccggaggtgaaagaccgcatcgaagacattgataggatcacgattatgacccatgagtcggcaatccggattatcgataaaaaagggccgcttcacaatccggctgaccgggatcactgcctccagtacattacggcaatcgggctgcttttcggagatatcacggcggatcattatgaagaggaaacggcgtctgacccgcgaattgatacattgcggagtaaaatggaggtgacggaacacaaagcgtactcaaaagattacttagacccgaataagcgatccatatcaaatgccgtacaggtgcattttacagacggcacggctacgggacggattgaatgtgaatacccgctcgggcaccggttccgcagaaaagaagccgttccgaagattcttgccaagttttcagcaaacatcagcactcatttttcattgaagcagcagcgtaaaatcgaagaggcctgcgaacactgcggccgaatgcagaagctcagcgtcagtgaatttatggacttatttctcgtataaaataggagggtgacaaacatgacgtggatcgtcagcaagcagtcgtctcaagaggagcttgcagagcggttccgtacgctgatggcagcgccggatctattgcagatccccggcgctcacgatgcgatggccgctcttatcgccaagaaaacggggttttcggctctttatttatcaggcgcggcttacacggcgagcagagggctgcccgatttagggatcatcacgtcggcggaaatggctgaacgggttaaagatttggtccgctcgtctgatctgcccgtccttgtcgatattgacacgggtttcggaggagtgctgaatgccgcccggacggcgaaagaaatgtatgaagcgcgcgcggccgccgtccagatggaggatcagcgcctgccgaaaaaatgcggacatctgaatgggaagcagctcgtgccgattgaagaaatggcgcaaaaaatccaagcggtcaagcgggccgcgccgactcttcttgttgttgcgagaacagacgccaggcagcaggaaggattggagggggcattaaaaagggcgtccgcttatataaaagcgggtgctgacgctgtttttccggaagcgctccaatccgaaagtgaattcagagcgttttccaaacaaatcagtgtgccgattctcgcaaacatgactgaattcggaaaaacgccgtattacagtgctgatgaattttccgatatgggctgtcagatggtcatttacccggtcacgtcactcagaacggcggccaaggcttttgagcgcattttccgccttctgaaagaagaaggctcgcaaaaagaggggctttctgatatgcagacgagaaaagaactatatgaaacgatcgcttacgatgactatgaagaactggatcaatccattgccaaaacaatactgccggacgactgaaaaagccctttttttgcaagggctttttttacagcttttttttcctgaaccgcgggctgacttgattgcgtttccgatctctgtacagaataaatccggccagaacataaaggccgaacaaaaaaaacgccaatccggccgccccctgaagaaaaagggacggaaacggggaaaacgcatgcccgaataatgcatctctcatcagcttaatgccgagcgccgcgacagcgccggggaggaccagaattaaaagcgcaacaagccggctcatattcagaaaacccctttacgatatgttttcctttattgtccaatcgaaaaaatattttgtcaagagatcaaaacgtggtaacataggggttgtgcaaattattgcaacgggaaatacaggtgtgcaaattttttcatataaaggggtatcgggatgcagaaggtgctgattataggtgctggtaaaggaggcacggcgctcctacagattttgatgaaaacaaagctgatccggattattgcggtggttgatcaagatccggaggcgcaagggctgcaagaagcccggaaatatggaattgcaacctcatcagattggaaaccctacataactgaagatatagatattatcatccatacaacaggcgataaagcggtcatggatgagctgctccatgagaaaaaagaacaaaccatcgtcatgccgggaaaattggcgtacatggtgtttcagctgatggaggaaaaacagcagcttatccaaatgctgaagtcgcagacgtataagcatgaccggatttttaattcaacgcacgacggcatgatttttatagacgtcaacgaaacgatcattttatttaatcagatggctgaaaaaatggtcggccaaaaacgggaggatgtcatcggccgccaaattaaagatgtagtgccgaacacaaagctgccgcggattctggaaacgagagagccggaatataaccagaagcagcttctcggaaagcacctgcagattgtcacgacaagactgccgatcattgatgaaggcggaaaacttctcggcgcgttatgcgtgtttaaagatatcaccgacgcagttgaactggcggaagaggtcacgaacttaaaacaaatccgcaccatgcttgaagcgattatacaatcatcagacgaggccatttctgtcgttgatgaaaacggcatcggaatgttaatcaacaaagcgtatacaaaaatgaccgggctgtcagaaagcgaagtcatcggaaaacccgcttccaccgatatctcagaaggggagagcatgcacctgaaagtattggggacaaggcggcccgtgcggggtgtgagaatgaaggtcggccccaataaaaaggatgttatcgtaaatgttgcccccgttattgtggacggtattttaaaaggcagcgtcggcgtcatccacgacgtgtcagaaattaaaacgctgactgctgagctgaatcgggcgcgccagatcatccgcacgcttgaagcgaaatacacgtttgacgacattatcggcacgagtgaacaaatgctggtcgcccttgaacaggcgaagctcggggcgaaaacgccggcgacgattctgctgcggggagaatccggcacaggaaaagaacttttcgcccacgccatccataatgaaagcgaccgaaaatacaataagttcattcgggtcaattgtgcggccctgtctgaatcactgctagaatccgagcttttcggctatgaggaaggcgcgtttacgggcgcgaggcgcgggggcaaaaaaggactttttgaggaagcgaataacggcagcattttcttagatgaaatcggagagctgacccaaagcacccaggcaaagctgctcagagttctgcaggaaaaagaaattatcagagtcggcggcgctaaagcgatttctgtcaatgtcagaattatcgcagcgacaaacgtcaacatcgaaaaggccatggcggaaggcgcgttccgtgaagacctgtattaccggattaaccgctatccgatctcaatcccgccgcttcggcagcgcaaagaagatattgaagcgctgagcattcggctcattgaaaaaatcaatcaggattacggccgcaatgtaaaggggctcacgccgaacgcgctgcgagctttatcagcctacagctggccgggaaacgtccgggagcttgaaaatgttctcggacgggcaatgatatttttagagccgcacatggaacggatcgaacagcagcatctgcctgtttttgaatcagagctgaatgaaaaaaacggcacccaaagtgattttccggatgtggaaggggaaaagctgtctcaggctgttgaaaaatttgaagcgcacgtcattcaaaaaacgcttgaaaagcataaattcaaccgaaccaaaacggcaaaagcgcttggtgtcagcattcggaatctgtactacaaaatggataagtacggccttgcaaatgacggcatgcaataaattgcagagaaagcgcaaacagctgcatgttttcttgaagaaagccggaataaaccctcccgcatatttggcacggaacttgcattgttaaaagcggattcgcacaaggaaggtggtacaaaatgaagctgagagacctagttgaaaaagccgcggcaaaaaacgcaaaaaccattgcagtggcccacgcagcagataaagaagtgatccaggccgtcaaaatggcggcagaacacttgtcggcacgatttttactgacgggtgacagcggaaagctgaaagagcttctcgcaaatgagccgaagttcaatgctgaaatcatccacgccgattcacccgaagaatctgcggcaaaagcagtgcgcgcagtgcgtgaacaagaggcggacgttttaatgaaagggaatctcccgagctcaactcttctgaaatcggttttaaaccgccatgaagggcttcgttcaaaaagggtgttatcacatgtagctgtttttgaggtgccggactatgaccggctgatgtatgtgactgattcagcgctgaacattgccccgtctcttgaagagctcgggcatattctgcaaaatgcggttcatgtcgcacattcagtagggaatcctatgccgaaagccgcagtccttgccgctattgaaacggttaatccgaaaatggaggtgacgctgaacgcggctgcgatcgtccagatgtgcaatagaggacagattaccggctgcattacggacggaccgcttgctttggataatgccgtatccaaagcggctgcgctgcaaaaagggatttccggaagcgtagcgggccaggcggatattctcttggttccttcaatcgaggccggaaatatgctttataagtcaatgatttattttgcgaaagcaagtgttgctgccgtcatcgccggtgcaaaagcgccgatcgcattaacgagcagagcggataccgcagaaaataaactgtattcaattgcgcttgcgatttgcgcatcacaagaacagtaggaggaacgaacctatggaaatttttaaatatatggagacttatgattacgaacaattggtattctgccaagatgaacaatccggattaaaagcgatcatcgcgattcatgatacgacgctcggccccgcactcggcggaacaagaatgtggacatatgacagtgaagaagcggcgattgaagatgcactaagactcgcaaaaggcatgacttataaaaatgcggctgccggtttaaacttaggcggcgggaaaaccgttattatcggagacccgcgcaaagataaaaatgaagaaatgttccgcgcgttcgggcgctacatccaaggcttaaacggaaggtatattacggcggaagacgtcggcaccaccgttgaagatatggacatcattcatgatgaaacagactatgtaaccggaatttctccggcattcggttcatcaggaaatccgtccccggttacggcgtacggcgtctacaaagggatgaaagccgcagcgaaagcggcgtttggcactgattcactggaaggtaaaacaattgccgtgcaaggcgtgggaaatgtggcttacaatctatgccgccaccttcacgaagaaggcgcttctttaatcgtaacggatatcaataaagaatctgttaaacgtgccgttgaggatttcggcgcccgcgcagttgatcccggcgacatttactcacaggcgtgcgatatttatgccccatgtgctctcggcgccgtcattaacgatgacacgattaaacagctgaaggcgaaagtcattgcgggagcggccaataaccagctgaaagaaacacgtcacggcgataccattcatgaaatgggaatcgtgtacgctccggattatgtcatcaatgcaggcggcgtcatcaatgtggccgatgagctttacggctacaatgctgagcgggctttgaaaaaagttgaaggcatctatgcaaacattgagcgggtgctcgatatttccgcgcgtgacggcattccgacatacttagcggccgaccgtctggctgaggaacgaattgagcgcatgcgccgttcaagaagccagtttctgcaaaacggccaaagtatattaagcagacgataggaatttgatctggaggtatgaaaatgttcgaaaaggaaaaacgcattctcattctgaatccaggctcaacatcaacgaaaatcggtgtctttcacaatgaacgctgtatctttgaaaagacgctgcggcatcccgaagaagagctgaaaacatttaacagcatcatcgaccaatacgaatttcgaaaaataagcattcttgagtctttgcacgaacagggcatcaacatttcaaagttcgatgccgtttgtgccagaggcggcctgctcagaccgattgagggcggcacatatgaagtgaatgacgccatgatcactgatttgaaaaacggctacaacggccagcatgcttctaatctgggcggaattattgccagggaaatagctgacggattaaatatccccgcgtatatcgtcgatccggttgtggtggatgagatgactccgctcgctaaagtatcaggaatgcctgaaatcaagcggaaaagcattttccatgctttgaatcaaaaagctgttgcccgtcaggcggcggcgtccctcggcaaacggtatgaacagatgaagatgatcgtcactcatatgggcggcggcaccacagtcggtgtccatgattgcggacgggtgacggatgtcaacaacgggcttcacggagaaggacccttcagcccggagcgcgcgggaactgttccggcgggtgatttggtagaaatgtgtttttccggcaagtattcaaaagccgatatgatgaaaaaacttgtcggcacgggcggactctccggctacctggggacaacggacgcggtgaaggtggaaaaacgcattcaggccggagatgaaaacgcgcgtctcatttatgacgccatggcttatcaagtagcaaaagaaatcggggcggcaagcgccgttttaaaaggaaaagtagacattatcgtcctgacgggcggattggcgtacgggaaaagtttcgtatccgccatcagatcgtacatagattggatttcggatgtactggtgtacccgggagaaaatgaactgcaatctctcgcgcaaggcgcgcttcgggttttagccggtgaggagcagtcaaagcaatatcagatcggcgaaggagtgaaaacaaatggcgactgagtatgatgtggtcattctgggcggcggcacgggcggttatgtagccgccatcagagcggcccagctcggcttaaaaacggccgttgtagaaaaagaaaagctcggcggaacatgtctgcataaaggatgtatcccgagtaaagcgctgttaagaagcgcggaagtgtaccgaaccgcaaaggaagcggcagcattcggcattgaaacggaaggtgtctccctccgctttgacagcgtgcaaaaacgaaagcagggaatcgttgaccggctggccggcggtgtcgcccacttgatgaaaaaggggaagattgatgtattcaacgggtacggacgtatgctcggcccttccatcttctcacctctgcccggtacggtttccgtcgaatacgcaaatggtgaagaaaacgacatgctgataccgaaacaattgattatcgcaaccggttcaaggccgaaaatgctgccgggtttagaagcagacggtacatatattctgacatcagatgaagcgttagagcttgaacgtctgccccaatccatgatgatcgtcggcggcggtgtcatcggaattgaatgggcatccatgctgaacgatttcggcgtcaatatcactgtgattgaatatgcggaccgcattttgccgacggaagaccgtgatatttcaagcgagatggaaaaactgttaacgaaaagaggaattaaggtcgtgacgggtgcgaaagtgcttccggatacattggaaaaagcggacggcgtttcaattgccgctgaaaagaatggaaaaaaagaaacgtatcacgcggaacaaatgcttgtttccatcggccgccagccgaacattgaagggatcgggcttgaaaacacggatattgaagcggaaaacggttctatcatcgtgaacgaagccgggcagacgaaggaatcgcacatttatgcgatcggtgatgttgtcggcgggctgcagcttgcgcatgtggcctcccgtgagggcatcattgccgttgagcatatggcgggtcttaatccggctccgcttgatgccgctcttgtgccgaaatgtatttattcaaatccggaagcggcgagcgtcggtctgacagaagaggaagctcttcgaaaagggcatgaactgaagatcgggaagtttccgttcatggcgatcggaaaggctcttgtatacggagaaagcgacggctttgtcaaaatcgtcgccgatcggaatacagatgatattctcggtgttcatatgatcggcccgcacgtcaccgatatgatctctgaagcggggcttgccaaggtgctcgacgcgacgccttgggaaatcggccagtccatacatccgcatccgtcgctttcagaggcgattggagaagctgcgttagccgcagacggaaacgcgattcatttttaaaaggaaagaaggaggggtttgaatgactacaaaccgccatcaagcattagggctctctgacgaagaagccgttgaaatgtatagaaccatgctgttagccagaaaaatcgacgaaagaatgtggctcttaaaccgctcgggcaaaattccgttcgttgtttcatgtcaaggacaggaagcggcgcaagtaggcgcggcctatgccttaaaccgtgataccgactatgtgcttccgtactacagagatataggggttgtgcttgcattcggtatgactgcaaaggatttgatgatgtcgggttttgcgaaagcagctgacccgaactcaggcggaaggcagatgccgggccacttcgggcaaaaggaaaacagaatcgtaacgggctcatcccctgttacgacgcaggttcctcacgcagtcggaatcgcgcttgcgggacgcatggataaaaaggatatcgtctctttcgttacctttggagaaggatcttccaaccagggggattttcacgaaggggcaaactttgccgccgtgtataaactgccggtcattttcatgtgtgaaaacaataagtatgccatttctgtcccgtatgacagacaggtggcgtgcgagaaaatatccgaccgggcggcaggctacggcatgccgggagtcactgttgacggaaacgacctgctggaagtttaccgggccgtaaaagaagcgcgcgaacgggcgtctaaaggcgaaggccctacattaatagaaacggtttcctaccgtttgacgccgcattccagtgatgacgacgacagcagctacagagaacgcgaagaagtagaagaagcaaagaaacaagatccgcttcttttatacaaagcatacttgcaagaagccgggcttctaggtgaagaagaagaaaagaccatgctggatgacatcatggctatcgtaaacgaagcgacagacgaagcggagaaagcgccatacgcatctcctgaatcaacgcttgatcacgtttatgcgaagtagggaggaatacttatgtctgtaatgtcttatattgacagtattaatgcagcaatgaaagaagaaatggaaagagatccgcgcgtgtttgttctcggggaagacgtcgggagaaaaggcggcgtgtttaaagccacggcgggtctctatgaacagttcggagaagagcgggtgatggatacgccgcttgctgaatcagcgattgccggtgtcggcatcggcgccgcgatgtacggcatgcgcccgattgccgagatgcagtttgccgatttcattctgcctgcggtcaaccaaatcatttcagaagcggcaaaaatacgctaccgttcaaacaatgattggagctgtccgatggtcatcagagcgccttacggcggcggcgtgcacggcgcgttgtatcattcccaatctgtggaggctatttttgccaaccagccgggccttaaaattgtcatgccttcaactccttatgacgcaaaagggttgttgaaagctgcagtccgtgacgaagatccggtgctgtttttcgaacataagagggcgtaccgtctgattaaaggcgaagtccctgcggatgattacgtccttccgatcggaaaggcggatgtaaaacgcgaaggcagcgacattactgttattacgtacggattatgcgtccattttgctctgcaggctgccgagcgccttgaaaaagacggaatttccgcacacgtattagatttgcgtacggtttatccgttagataaagaagccatcattgaagccgcgtctaaaacgggaaaagtattgctgatcacagaagatacgaaagaaggcggtattatgagcgaggtcgccgccattatttctgaaaactgcttatttgatttagacgcgccgatcaagcggcttgcaggtcctgacgttccggcaatgccttatgcgccgacaatggaaaaatacttcatgatgaatcctgacaaagcagaagccgcgatgagagaattagcggagttttaaagacgtaaggaggtttttgacatggcgattgaacaaatggctatgcctcagctcggagagagcgtgacggaagggacgatcagcaagtggctggtatcccccggtgatcaagtgaataaatatgaccccatcgcggaggtcatgacggataaagtgaatgcggaggtgccgtcttcttttaccggtacgattacagaacttgtaggagaagaaggccagactcttgcagtcggcgagatcatctgcaaaattgaaacagaagaaacggaaaccgaagaggcgccgaagcgggaagaagagcagaataccccttcagacaccggtgcaaaccgtcaaggtaaagatcagtcaaataaagcgcgttattcgccggctgtgctcagattagcgggagaacacggcattcagcttgaagaagttgaaggaacgggtgcaggcggaagaattacgcgaaaagacattcaaaagatcattgattcgggaatgaagcagaagtcggaagcaccggcgccggctgccgttcaaacaacgcaacaagcgccgaaacaacagcaaaaacaagcgccggcacccgctctgtcagccggtgatattgaaattccggttacaggcgtcagaaaagccatcgccgccaatatgcataaaagcaaaacagaaattccgcatgcctggacgatgatggaagtcgacgtcacgaacatgacggcgtacagaaacagcattaaagactcatttaaacagaaagaaggcttcaatttaacgtttttcgctttctttgtaaaagcggcggcgcaggctctcaaggagttcccgcagatgaacagcatgtgggcgggagacaaaatcgtccaaaagaaagacatcaacatctccattgccgttgccacggaagattcgctgtttgttccggttattaagcatgctgatgaaaaaacgattaaaggcatagccagagaaataacggaccttgcgaaaaaagtgagaaacggaaaacttactgcggaagatatgcagggcggcacatttaccgtcaataacacgggatctttcggctcagttcaatctatgggcattatcaaccatccgcaggcggcgattcttcaggtagaatctatcgtcaaacgtccggttgtcatgaataacgggatgatcgccgttcgtgatatggttaatctttgcctgtctttagatcacagagtgctcgacgggctcgtgtgcggccgattcctcggacgcgtcaaagagatcttagaaaacattgatgaacatacttccgtctattaaaaaaaactccttttgcccgggcggcaaaaggagtttttttattttcattgtgaatcctcgggaacaatcatagtgagatgatgttttttcacttcgatcgtacaaggtgttgttccgtatacctcgccatctgtatccgcgtccatctcacgtccggtttcgatttcaatcctggaggcctgaatataggacagctcccctttgaaatcatcaaacgaaccctgctccatcgtcatcagctcccgcaacgcggcaaggcttgtgttgcggcagattaacacatcggctaagccgtcctggaggctggcatcaggcaggggaactctgtttgtcccgatataatgcccgttcatgacaagcaccattacggcttcgtcttctttcacctcgccgtcaatcgtcaatttgacaggaaacgggttcgcgcttgtcatcgtccgcaaggcgctcgtgaagtagctgattttaccaagccatgctttttcagtttcattaatatggcttgatgcttcggtgatcagtccgatgccccagaagttcagaaaatagccgtcatccgttttacagacgtcaatcatccgtttatgtccggccgcgagcacttcagcggccttttgaaggttttgcgggatgccgagcgcccgggagaaatcgttgcacgttcctcccggcaaaatgccgacagcgggtctgtgatcaagcttgctgatgctgttgatgcattgatgcacagtgccgtctccgcctaaaatatataaatggtcaactgaactgtcgagattttcacaatactgacgggcatcatcctgatgtttggtcggtttaatcaaaagttcatcagctgactgggccaaaatggggacgaccgtgccgagcgttttatcaatctgtttttgaccggcgtttccgttataaattaaaactgctttccgttggctcatatgactgctcctttatttcagacaatctccttaacaagtttcccgtttttaaagggtcataaacttacatcgggaacataaaagggacaaaaaacaattggatatgagcggtgtcatttgccgatagggaggttccttgctatcataagaagagatgatcaaaaaggagaggtcccaattgaatatggattttaatttatttatgaatgatgtcgtgcgtcaagcccgccaggaaatcacggccgccgggtatacagagctgaaaaccgctgaggaagtggacgaagcgctttcgaaaaaaggaacgacactcgtcatggtcaactctgtatgcggatgcgcaggcggtattgcacggcctgccgcgtaccattccgtacattacgataaacgcccggatcagcttgtgacggtatttgccggacaggataaagaagcgacagccaaagcgagagaatactttgaaggctatccgccgtcctctccgtcatttgccattttaaaagacgggaaaatcatgaaaatggtggaacgccatgaaattgaaggccatgagccgatggccgtcgtcacaaaactgcaggaagcatttgaagaatattgtgaagaagtataagtgaaagaaaaaccccggagccaagcgcttgcggggtttttttatatggcatctgtataaatataaatgtttatacatcggcgttcagctgtcactaacctgaaaaacaatgactataataaacacagaaaggaaaatatatttttcaaaaatagtattgcatcacaattaaaaagtgtttaaaatacaagttaacgaataaatattcaaatttaagagatcagtagatatgggggaaatgaatcatgaagaaatggctgttggtattagctgccgcatgtatcacctttgcgctgtccgcttgcggatcaggcaattcaggctcagagggcggaaagaacaagctgattatgggtacatcggctgactataaaccatttgaatataaagacggcgatcagatcaccgggtttgacgttgatctggcaaaagctctaggcaaaaagaccggctatgacgttgaggtgcaggacatggacttcaacagcctgattacagccttgaagtccaagcaggtagatatgattttatctggaatgacacctacaccggaacggaaaaagcaagttgatttttctgatatttattatactgctaacaatatgatcgttacgaaaaagggaagcagcatgaaatccctgaatgatctgaaaggcaaaaccgtcggtgttcagctcggctccattcaagaggaaaaaggcaagaagctcgcttcgaaatacggttttcagctcgaagaccgcaaccggatctcagacttaaccgaagagatcaaatccgggcgttttgatgccgcgattatcgaagacatcgtagcacaaggctatttcagctcaaatcaagatctgcagggctttgcgtcagcagatgcgaaatcagacgaatcgggttccgcgattgcgttccgcaaagacagtgatctgacagcgaagttcaacaaagcgctgaaagaaatggagaaaaacggagaaatcgaaaaactgaagaaaaaatggttcaccaacgagaaataaaagaaagctcaacttttcgttgagctttttatcttgaataaagacaaaggagatcacacgtatgaatttggatttctcagcgacaatcccccaaattccttttatattggaaggccttgcggtcacattaaaaattgtgctcgtttcagcggtcatcggtcttgtattaggcatcgtgctcagcttatttaaaatcagcacgatcagtccgctgaaatggattgcggatttttatacttcgatattccgcggcacgccgctcgtgctgcagctgatgatcatttatttcggtatgccgcagcttctgggctttcagatcgatcaattttgggcggcggtcaccgcattatcgctcaattcagccgcttacgtctctgaaattatcagagcgggaatcaacgcaattgacaaaggacaaaaagaggctgccgtcgctctcggcgtgccgtacggaaaaatgatgaaagatctgctgctgccgcaggcgtttaaaaacatttctccggctattattaacgaattaatcaccttaacgaaagaatcggcgatcgtcacagttatcggtcttggcgacattatgagacgggcctaccagtccggtgccgcaacatacaactatttagaacctcttattgtggcgggcttaatctattacgtgctcgttttgatcttagcattcatcggaaaaggcgtagaaaggaagctgaaagccaatgattaaggtcgacaacctgtcaaaatcattcgggaaacatgaagtactgaaaaacatttcaacacagatcgaagaaggggaagtcgtcgctgtcatcggtccttccggttccggcaaatcaacgtttctgcgctgcttaaatctgctggaaaacccaagcggcggaacgattgccattaaagaaaatgaaattaccgcagctaaaacgaataaactgaaagtgcgggaaaatatcggcatggtatttcagcattttcatttgtttcctcataaaacggtgcttgaaaatatcacatacgcgccggtcagcgtgaagaaagagtctaaaaacgaggcggaggaaaaggcgtgcgccctccttgaaaaagtcggactgcttgacaaacggaacgactatccgaaccgtttgtcaggcggacagaagcagcgggtcgccatcgcgcgggcgcttgccatgaatcctgacatcatgctgtttgatgaaccgacctcggctcttgacccggaaatggtcaaagaagttcttgaggtgatgaaagagctcgcgcagacgggcatgacgatggtgatcgtaacgcacgaaatgggatttgccaaagaagtggcagaccgcgtattattcatggatgaagggacgatcgtggaagacgggcagccggaagaattttttctttctccgaagtcaaaaagagcacaggactttttagaaaaaatattataaaatataactggaagaaaagaagaagaatgctcttcttcttttttttgagaaagaaacaaacagaatggagcaagcaatgtttaaaatcggttaccgcacactaaagaccgcacttggaacggcgctggccatttatttagcccagctgttgcatctgcaaaacttcgcatccgcaggaatcatcaccatattgtgcatccagattacgcaaaagcggtcgcttcaggcctcgtgggcccgatttgccgcctgtttattggcgatcgtcttctcatatgtctttttcgggctgatcggctattatccgtttgcgatcggaatattgctggtgctgttcattccgactacagtcgttttaaaaataaacgaagggatcgtcaccagctcagtaatcattcttcatttatatatgtccggcggcattacgatggcgtttatctggaatgagttccagctgatcaccgtaggtatcggcgtcgcgctgttaatgaatctgtatatgccgagcctcgacagaaaactcgcggcgtaccggaaaaaaatcgaggacaacttttccgtcatcttcgccgaaatcgaacggtatttgttaactggtgagcaagattggtcggggaaggaaataccggagacgcatcagatgattcaagaggcgaaaaacctcgcctatcgggacgtgcagaatcatattttgcgccatgaaaatctttactatcattattttaagatgagacagaaacaatttgaaatcattgaacggctgctgccgaagattacctctatttcaataacggtggagcagggcaaaataatcgcccatttcatccatgaattaagggaagccattcatcccggcaataccgctcataaatttttaaaaagacttgcagaaatgagaacggaatttgaagaaatgccgctcccggcaacgcgcgaggagtttgaagcgcgggcggctttgttccacctcctcggtgagatggaacaatatctcgtgattaaaagttatttcaaaggcatcaagctgtaaaaaacatatggatcaatcgcatgagtcctcctttcattggtcattctaatgaaaaaaggaggggagcccatgcgattttttttattgtcagccgccctgctgctgtctccgctttggccgcttggcgcgaaccctttgccgggtgacccttatattatcgtcaataaagccacaaatgcgcttgctgttgtgaaggataaccgaatacaaggcatttatcaggtggcgacgggaaaaacggatgatttgacgcctgaaggagaatttacggtaacggtcaaagccgtcaatccgtattaccggaagaaaaatgtgaagggaggcgcgccggaaaacccgctcggcgtccgctggatcggttttgacgcgaaaggaaccgacggcaggatatacggcattcacggaacaaacagagaagagctgatcggggggtttgtatcaaacggctgcatccgtatgaaaaaccgggatgtcatccgtattttccggattatccctcccggaacgaaagtattgattacaaaagaaaaccgctcattcgaggaaattgcaatagagcggaaagccctcataaaaaagcaggaaacccccttgcaatgaggcgcctgcttttttaccgcaaatacatcataatgcctgagaggagggttgaaagtataaatacgcccaaaatgacgatgacggcgcttttcataaatttttgagacattgtttcactccttaagattactgtctatcattttaacgtgttttgcttgtatgaacaagccatatcctatggcggaaagcaggtggccgcgctatgaaaaaacttgatcatgtcggcattgccgtcagctctattgaagctgcgagaggattttacgaacggatgctcgggcttacgtatatgggagacgagctggtaagcggccaaaatgtgagagttgcttttttagaagcgggaggcacaaagcttgagctgattgagccgctttcggacgcgtctcccgtcagctcttttttacagaaaagaggcgaagggctgcatcatttagcattccgctgcgccgatatgaaggaaacgatcaaggagcttgaagcatgccgcatgactttgatccatcatgaaccgcaaaacggagcgggcgggaagaagatcgcatttctctctccaaaagaggcgaacggggtcctgattgagctttgtgaaacaattgaaaaaggagaaactcaagatgagcatgagtgatcatatcagacacttaaatgaaagacgttcctttttaacaaacggcggcggagcggaaaaaaatgaaaaacagcacaaaaaaggcaagctgacggcaagagaaagaattgactatttattggacgaagacagtttttcagagctgcagccgtttgccaaaagccgcatgcccggatgccagaatgctccgggagacggcgttgttaccggatacggcacaattgacggacggcccgtgtatttgtttgcccatgactttaccgtactcggcgggacgctcggcgagacacatgcggaaaaaatcgcggcggtaatggatctggcggcgaaaaataaaaccccgatcatcgggctgaacgactcaggtggtgcgagaattcaagagggtgtggtatcattaaatggatacggtcatatctttaggcgcaacgtcctttactcgggagtgattccgcaaatttctgtcatccttgggccgtgtgccggcggtgctgtttattcacccgcattgacggattttgtgattatggcggaacatacgtcgcacatgtttattacaggcccgaaagtcattgaacaggttacgggtgaacagattgacgcggaaagtttaggcggtgcgggaatacataatgtgataagcggaaatgcccactattccgcacgaacggaaaaagaggctctttccgctgtgaaaaccctgctttcttatctcccgcacggcggacagacggcattgcccgttaaaaaggaagacgccagaccgttattaaacaccctcgttcccgcggacagttcgaaaccttacgatgtgttacaggtaataaaagagctggcggatgacggaacgttttttgacattcagccgtattttggcaaaaacattgctgtcggttttctgaaactcggacggcgtacagtcggtgttgtcgcaaaccagccgaaacacttggcggggagcctcacgattgatgccgctgacaaagcgtcgagattcatccgtttttgtgacgcgtttcatattccgctattgacgatcgctgatgttcctgggtttcttccgggccttcagcaggaacatgcgggaatcatccgtcacggagcaaaattgctgtatgcttttgccgaagcgacggtgccgaaagtgacgctcatcatcagaaaagcttacggaggcgcctatgtcgccatgaattcgaaagggctcggggcagatcttgtattcgcctggcccaatgcggaaatcgccgtgatgggagcggaaggcgcggcgtcgattttatacagcagagacatacaggcttctgacgacccggagaaaacgaagcgcgaaaaaaaagccatatacgaaaaggaaaacgccggtccgtataaagcggcggcctgcggaatggtggatgatatcatccggccggaagactcgaggaaaaaattgattcaggcatttgacatgcttgcgcataaggaagaggaaagaccgaaaaaaaagcacggtaatataccgctttaaacggagggaactgaaaatggtaaacgaaaaacgtctgcttgaagaatttcttgaactcgttcaaattgattcagagacaaaacatgaagcggaaatcagcaaggtgctcaaacaaaaattcactgatttaggattgagcgtaaaagaagatgatacaaaagaagtgacggggcatggagccggcaacttaatctgtacgttaaagggcacaaaagatgcggatacgatttatttcacatcgcacatggacacggttgtcccgggcaaaggcgttaagccgattgtggaagacggctatgtaaaatccgacggcacgacgattctcggcgctgatgataagacgggacttgccgcaatgtttgaagccattaaagtgctgaaagaacaaaacatcgagcacggcaccattgaattcattatcacggccggagaagaatcgggattagtcggggcaaaagcaatggatcgttcagacattaccgcgaaatacggttttgcgcttgattcagacggaaaagtcggcaacattattgtagccgcaccgacacaagcgaaagtgagagcaaccattttcgggaaaacggctcatgcgggggtagaaccggaaaaaggcatctccgcgattacaatcgcatcaaaagcaatctctaaaatgccgctcggccgtattgataaagaaacaacggctaatatcggacgtttcgaaggcggcacgcaaaccaatatcgtctgcgaccaggttgatattctggctgaagcgcgttcattagtgcctgaaaaaatggaagcgcaagtgcagaaaatgaaagaagctttcgaatctgctgcagctgagctgggaggccgcgcggaagtggacatcgcggtcatgtatccgggtttcaaatatcaggacggcgatcaggttgtggaagtcgcgaaaaaagcggcggcaaaaatcggccggccgagcgaacttcagacaagcggcggcggaagtgacgcaaacgtcattgccggccacggcattccgacagtcaacctgtcagtaggctatgaacaaatccatacgaaaaatgaaaaaatgccgattgaagagctcgtcaaaacggcggaaatggtcgttgccattatcgaaacagcggccaactaaaaacgaagcacccagttgattgggtgcttttttcattcttcataataattggcttaaagccttgcagatacaagaaaaaaaccctgccggataggttccggcagggtttcagtattatgatttggcgggctccgcctgagccgcagcttgtttctttttatgatgcgtctgctgtaaaagtacattctgcactgtcaaaaatagtccgcttgtaaaccagtaaagcggcagcgcagccggtacgttaagtgaaaaaatggtcatcatgacagggaaaataaagaccatgatttttgctgactgcatcgcggccggattttgagcagccggtgaatatttctcgtttaatttttgggaaatataagcctgtaagaaatacatggcccccgcgcacagtgatacaagaatatcagaatgccctaagctgaaccacagaaatgagtgtgaagcgatttccggcgttgagcggatggcgtaataaaaaccgatcaaaatcgggaattgcaccagcatcggaagacatcccattgccatcggattcagattgtgctcacggtaaagcttcatcatttccatttgcagttctttttgtttctccgcatctttcgtttgtttcattttagcctgaatgctgtcgacctgcggtttgatcacagccattttttcctggaacacccgctgtttcttaaattggttcacaaacaaaggcaatacaacgatccggacgataatcgtcaccagaataatcgacaatccgtactcaccgtggaacaggcccgccacgccttttaaaagtgccgaaaacggctcgatcaggtaatcgtgaaaaaacccgatattcccgaggcctcccgtctgagtctgagatgtcgctgcaaaagccgagcggcctgtgcacagtacgataaaaaacaatccgaatgcgatccatttttgatatgttttagacaattatgtctcctcctttttatcttcacttgccgttataaaaggaggaagctgacatcttcatcatcattcgccggtgaattcatgcggatgactttacgtatccaagttgtaatgcgatgatatataataataagaaagtctgttcggttcagctgaacgactgcttgatgttcatctattcgtttcgttctccaatgctcgcctgcgcggcgctcacgcaaaagaaaagcgatgccgatcgcggtcagagcgggaagaataattgtgaaaaaatcgactaaaaataaaaagtcattcattgactcaagaatcattttatcacatccattcagctcttattttactacatatatataaggttgtctatgaaaggaaaggaggcgccgggagtggccggaaaagggagaattatatttcatatcgatatgaacagtttttatgcctccgtagaaatggcgtatgatccgtctttaagaggaaaacctatcgccgttgccggaaacgtgaaggaacggaaaggaatcatcgtcacctgcagctatgaagcgagagcgcggggcgtaaagaccaccatgccggtgtggcgggcaaaacgcctctgtccggaactcatcatcgtgcctccgaattttgaccgctaccggagttcgtcaaaagaaatgttcagcattctgagggagtatacggatttagtcgagcctgtttctattgatgaaggatacatggatattacggacacaccgcacagccacagggcgtatgagacagccgaagacattcaggcgagactgcaaaaagagcttctgcttccgtcaagcatcggcatcgccccgaataaatttctcgctaaaatggcttctgacatgaaaaaaccgctcggcatcaccattttaagaaaaagagagctgccggacgtattatggcctcttccgattgaagagatgcacggtataggaacgaaaactgcggaaaaaataaaaacgctcggcatcaaaacgatcggtgatttggcaaaaggagatgaacatgcgctgaaaacgcttctcggcataaacggcccgaggctgaaggataaagcgaacggcatccatcctgcagaagtcaatcccgagcggatatatgaatttaaaagcgtcggcaactcatccaccctgtcgcatgattcggctgactgggatgaattaacgggcgtgtttgaccggctcgcgctgtctgtgagcgaacggctccagcgtaaggaggtcatggcctgccggctgttcatcatgattcggtatgcggattggaaaacggtcacaagaagcatgaccctcagcaatccggctgatcagaaagaagacatcatggaagcggcgatggaactgtttgacaagcactggaaccaaaatccggtaaggcttctcggcatcaccggaacggaactggttgaaaaacagcaggcgtataaacagcttgatctgttttcattcaaggaggacgcaaaggatgagccgatttttcagatgatgaacgagctgaatgaaaagtacggccaaaacctgatcagaaaaggcgccgttataaaaaaagaagaaagcaaaacaaggggaacgagctttaacagagactttttccaggatgaaaagaaaaggtgaataacttgaaaaaaggggttatgtatgataatttctttagtataaatatcattttattttaatttaaattttaaaatggttaaacgtttgaagaagggacgttagaatatgtcaaaacaacaaatcggagttatcggtcttgcggtaatgggtaaaaatctggctcttaacatcgaaagccggggattttctgtgtctgtatacaacagatcaagcagcaaaacggaagagtttttagaagaggcaaaaggcaaaaatgttgtcggtacatacagcattgaggagtttgtccagtctcttgaaacaccccgtaaaattttattaatggttaaagcgggaactgcaacggatgcgacgattcaatctcttcttcctcatctggaaaaagacgatattttgattgacggcggaaatacatactataaagatacacagcgccggaacaaagagcttgccgaaagcggcattcactttatcggaacgggtgtatcaggcggtgaagagggagcgctgaaagggccttctattatgccgggcggccaaaaggaagcgcatgaactcgtgaaaccgattttagaagccatttctgctaaagtggacggagaagcttgtacgacatacatcggcccggacggagcggggcactatgtaaaaatggtgcacaacggtatcgaatacggtgacatgcagctgatctctgagtcatatttcattttgaaacaggtgctcggattgtctgccgaagagcttcacgaagtattcgctgagtggaacaaaggagagcttgacagctatctgatcgaaatcacggctgacattttcactaaaaaagatgaagaaacgggcaaaccgcttgttgacgtgatccttgataaagcaggccaaaaaggaacgggtaaatggacaagccaaagcgctcttgacttaggcgtgccgcttccgattatcactgaatctgtttttgcgcgtttcatttccgcaatgaaagaagagcgtgtgaaagcaagcagccttctgtccggaccagacgttaagccggttactgaaaataaagaagagctgattgaagcggtcagaaaagcgctcttcatgagtaaaatctgttcttacgcacaaggcttcgcccaaatgaaagccgcgtctgaagaatataactgggatctgaaatacggtgaaatcgcgatgattttccgcggcggctgtatcatccgcgcggcgttcctgcaaaagatcaaagacgcatatgaccgtgaaccggagcttgacaacctgctgttagacagctacttcaaaaacattgcagaaagctaccaaggcgcccttcgccaagtgatttcacttgccgtagcccaaggcgtgccggtaccttcgttctcaagcgcacttgcgtattacgacagctaccgtacggcagtgcttcctgcaaacttgattcaagcgcagcgtgattacttcggcgcgcatacgtatgaacgcacagataaagaaggcattttccatactgaatggatgaagtaatgaagaagcccccgcagttattgcgggggcttttctgatatcaaaaaccgcggaccgtcatgaacggcgccgcggtttttgatgttttcttatatattccaccagtggagaccgtctttttcaagaagatcgtccgaagctttcggtcccattgacccggcttcataattcggagaaagggttttgtcggctgcccacgtttcggaaatcacatcgacgaaattccatgaaagcgccacttcgtcccaatgggcaaagtttgtcgcatcaccgagcagacagtcatggattaatttttcataggcttccggtgtgttcatttcgtcactgcagttgctgcagtagtccagcttaatcggctgagcatgagcggctccgcctaattttttagcattcagatatagtgtaatgccttcatccggctgaatatggatgacaagcaggttcggatttacattcgtttcattgccgtaataaaggttcatcggaatgtctttaaattgaacgacgattttcgttgatttttctttcatccgtttccctgtgcggatataaaacggaacgccggcccagcggaagttatcgatcaacagctttccggacacgaatgtttccgtattggaatccggtgctacattatgctcatctgtatagcttggtacggagtttccgtcaatcgttcccgcttggtattgtccgcggacgaagtagtcgctcacttcgtttggggcgacagggcggagagctctcagcaccttcactttttcgctgcggatttcttccgtgttcagtttaatcggcggttccatcgccaagagagcgaccatttgtaaaatatggttttgaaccatatcacggagtgcgcctgatttctcataatatctcgcacgatcctcaacgccgagatcctcacttgacgtaatctggatgtttgagatgtagcggttattccacagcggctcaaacagcgcattcgcaaaccggatgacttcgatattttgaaccatttgtttgcctaagtaatggtcgatccggtaaatttgatcttccgtgaaagcttcgcgtatttctttgttaagctctttcgcactcggcaggtcatggccgaacggtttttcaatgacgagacgggaccagccatttgtcgctgtgacaccttcgtttttaagtgattttgcgatcgtgccgaaaaactcaggagccatcgccaagtaaaacattctgttgttcgggatttcatatgtatgttcaagctgatcaagcaggacattcagctcctgataggaacccggattcgttacatcaaacggatggtaataaaaatgagatgtgaaatcgtctatgtctttttgcccggcagaagaaacagacgttttaacggtttcccggaggtcctcgtttgaccaaggtcttcttccaacacctacaactgcaaactcttcaccaatttgaccatttttatataaacggtgaatggatgggtaaagttttcgttttgccaaatcccctgtggcaccaaatattacaattactgcttttggtttgtcgtttgttttcacttagagtacctcactttatctgaagcatggtttaaaaccccgcatatttccttcattttaaatctaaaattcgttgaaagcaaacatttcagcctgttttttgcggtttgcggaaaaaaattaatcaggccggagaaggcccgggtgaattcacattttcagcctgatcctgtatccttagtagtacaaagatctaggaggaagcattgtggaattattatttttagggacgggggccggcatgccggcaaagacgagaaatgtaacgtccgtcgcgctgaagcttcttgaagaaaggcgttccgtatggctgtttgattgcggagaagccactcagcatcagatattacatacaacaatcaaaccgaggaaaattgagaagattttcatcacccaccttcacggcgaccatgtttacgggcttccgggtctgttggggagccgttcatttcagggcggtgaagaagagctgacgatttacgggccaaaaggcattaaagcctttatcgaaacaagcctgaacgtgacggcgactcatctgacgtatcctcttaccgtacatgaaatcgaagaggggacggtttttgaagatgagcaattcattgttaccgcagcatccgtcattcacggcgtggaagcgttcggctaccgggttcaggaaaaggatattcccggcgcattgcaggccggcagattgaaagaaatgaatatcccgcccggacccgtctatcagaaactcaaaaacggcgaaacggtcacacttgacgatggcagaatcattaacgggcgggattttctggaacccccgaaaaaaggaagaatcgtcgctttttccggggatacgagggtatcagagcgggtaacggagctggcgcgcaatgcggatgtgcttgttcatgaagcaacatttgcaaaggaagatgcaaagctcgcacataattattatcacgcgacgacagaacaggctgcgcaaacggcaaaaaaagcaggcgccaaacggctgatcttaactcatatcagcgcaaggtatcagggtgaatcgccgatagagcgtctcgaacatgaggcgaaagcggtatttgaaaacagtaagatcgcatttgacttcatggaggtcactgtggagcggtcttaaaaaatggacgcttgacatttttttctgatgagatataataaaacgtaataattacgatttgaaggggtgaaaatgatgcgtgtgaatgttacattggcctgtacagagacaggggacagaaattatattacgacgaagaacaaacggacgaatccggaccggttagaaatgaaaaagtattcaccccggttgaaaaagtatacgttgcatcgtgagacaaaatagatcacgataacaaaagccattgtgccgttgcacaatggcttttgttttatcagtttaccgcctgataggcaggagcattcatttgctggcgcaccgcgcaccaaacatcataaatggcaaggtggacgatgtgcggttcatcgtgatgaatggcatgagaactgtttttggcctgaatccatccgctttgataagagacatcaagcatgcttctgtgcagtttcacccattgttcatgagcgtgctttaagcgctcatcccgctctcccgatgataaaatcaacagcggcatatcgccgaagtgaatctgctgatgcttgatctgcctaaggctcgtcaaaaattccgcgtgtgatccttccaatttgaactgtttcaaataggcggccttcatttcttcgggaagaagcggaagcactttcgtctcctgatcctcagaaaccggatcaagcagcaccatcccgagaatatcccggcggttccggctcgcccaaagtctgctgataatcgtgccgtatgaatgcgagacgacaaggtaaggaggcttgacgccggccttcagaagaagagcgtttaattcctgtaccatatggtccgccgttctcttgtttcggcttcgtccgcttttgccgattccggctctgtcatatgtgaaaaccccaaattcttcatctatgtcagcgagtaatgatgtccatgtttcagaagaagtgccgtagccggcttcaaagacgatcgtcacttcgccggcgcctttacggtgtttcgtataaaacggacacccgtcaatcagatatgtcctttccatccatgctgctttcattggagtcatcccctctaattggttctatagggaagacggagaagcttcggcaatcgtttctcaaaaaataaaaaaagagacagccggatcgaaaaactccggctgtcacttcatcaccatgctctgtcgtattgaaccggtgacggtatttcagtattcagctgcttcgctgcactccttgcaaagtgcggatcgcgcagaagttctcttgcgacaaaaataaggtcagcgcggttgttttgcagaatttcttccgccattgttcccgtcgttatcaaaccgacggcgcctgttgcgatttcggcctgttcacggattttctctgcgaagctcacttggtagcctgggaagacattaatatcagcttgaacgagtgcgcctgagctgcaatcaatgaggtcgactccctgttctttcatccacttcgcaaaaccgatatgatccgcaatgtccagccctttgtctgtataatccgatgcagaaatacggacaaataacgggccgtcccagacttccttgacagcttcaatggtctcgcctaagaagcggtagcgattttcatgtgagcctccgtattcgtctgtacggtgattggacagaggggacaaaaattcgtgcattaagtagccgtgtgccgcatgaagttcaataatatcaaagccggcttctttcgcgcgcgccgctgcctgtttgaattcctgaatggtttctttaatttgttctgtcgtcatttcagccggtgttttggactgctcatcgaacggaatggctgacggagcgtaaatgtctccctcaagctcagctttacgtccggcgtgcgcaagctgaatgccgattttagatccttgcgctttcacttgttccgtcagtttggcaaaaccttcgatatgatcatcgctccaaatgcccaaatcctgatcggaaatgcgcccctgcggattaacggctgtcgcttccacgataatcaggccgacctgtccgattgcacgcgatatgtagtgcgccatatgaaaaggctgcagttttccgtccttctcatgtgaggaatacatgcacatcggtgccataacaatacggtttttgatcgttacatctttaacggtccatggtgtgaataattttctggccatttatttcgcctcccggaatgtttttagacattgattataacaactcatgatcattcagtcatataaactgctcacaactgaacacatcgttcttattgttctggacgggcatttttttatacacagcgtggccgtatcttcataacaggcatttacagccgatcatatagcaaatatagatgagaaacgcaccgatgactgcgtggcctcctttgaaccagtttgtcaggatgaaaatactgctgatgaagatcactgcgccgaaggcaccgaatattccgtttttttgagcggctctgaaatcgtcggcactcatatttttcagctgcaagtgaatattcagtaacgtcatgatcggcagcaatgtaataacgcctgataaaaataagtatttcgatttggttaaatacgcggcggccaccataacggtgccgccgataaaaaattgaatgagaaaactcatgctgaaacgctcaccttctgtttgtgatcaagtataatgatggaaacattgccattttatttttgattgatgtataagtaaactaaatataactaatgcattggataataaagaatgatatctgggagatgaagccggttggatttaaagaagcatttagcctttattaaaacggttgaaagcggcagcctgacccaagccgctgccatattgaattacacacagccgaacatcagccaaatgatcagtaaattagaggaagagtacggttttccgcttttgatcagacagcggcatggagtgaggcccaccgcaaatggcttgaaagtgttacatattatgaaggaaattcaaaaaaactatgaaaaactgtctcaaaccgttgataatattaatgggttagaaagaggggaagtccggctcggcactgttacgagcgtggcggtaaaatggctgccgaaaattttgagggaatttaatgagctgtatccttccattaaggtgcatttgtttgaaggaaattctactgaactggaagaatggttgaaagatgaccggattgatgcggcgatcgggacatcccacagcgagaagtggcatttttacccgttggccgaggatccgattgtagcggtgatgagcccgcagcatgaattggcgcaatgtgaaacggttccgttacatgtcatggagtccgtcaaatgtatcgtgccttatccggagacacattttgatgtgctgaaagtgctgaaggaagaaaagatcacaccgcgggtcgcttatcaaatcagaggggatgaagcgattattgcaatggtgcggaacaatctggggatcagcatcttgccgcagcttttggtgaatgattgtgatgtgctcatcaaacggtttgaccggtatgtcttcaggcagctcggcattttgacagctcatgcaaaggagacgcagacaccttctgtccagaaactgattcaatgcatacaagaatgggttgcggtccgtcaggcttctgtctgaagaagcctgatgaaccgtttaagccggttcagcataatagaacagcataaaatatgtcaccggttcatccgaggaattaaaataactgtgcggcatcgcccgaagtcagcacatgcttttcgtcatcaagctcaaccgtcaattcaccgctcttgattaaaatgtatcttcccctaaatgtgattttgcctcatgggcgcagcccggcttcaggtcaactatgtcaaaaagtttgaccgtgacggtggtgagcggggttatttcggtgtcgggctttcgtttgtatataaaaagggcatcaacggcacatgctgttgatgctttttttgaaatgctagggtttggagagcacttcaattccgacgttgaccattttgtccagtcccataaaagacaggcagattttggcgcgtctttttcttttatcgatctttttaataatgccttccattcctttaagaggccctgaggcaacggttacttttgaattttcaatatagacttttgaataatctacagtgtctccttctccgatcagcctaatgatagggaggatttcttcatccttaattgtcgtgaaataggttttacgctctttggaataatatgcgccgttattcacgattctgcatgaaatggggagttctttgattttatgaaatgtccgctctgtcatcttcgttttaaacaacacatatcccggaaacatctttttgagtgcctcgtatttgattccggcttttcgttctgtgacttttttcttgggtatgattgagtagagagcctgctcatcaaactgcagacgcagaaatttttgaactgtttcttcttttccggactctacaaaaagtgcgtaccatttcatgactgggtcctccttagaataataagaaattattatacaaagaaagtatttaatggatagtatttaaagtgattaaaaatttttctaattcgtcttttttttacataatatatgaaaatgaaaaataagtatagacccaattgacagagaagcgatgaattttctttgacatgaatagggttcagggaattatctgacatttatcccgaaacaattatgccgactgtccacctaacataaaactgtggaataaatgtcagaaaataacgaaataaagccttgacattattatctataaattgatattattctctttaaatagcaactatttgttaaatttattaaattgatgtaaagcacctattaaatttcaatcgctgtttcggcacgttgaagaggaaatagggattataaaaatgattgtagtgtatatatctacatatacatgataagggagaagtgtgccgtcatggctgttttcgggcatattggcactgcagcttgtcatgcgaaacattcagtaaacaagcaagatgtctttatataaattatgttagaaaaggaaaacacaatgcgtttgcgatttttaaacctgtgctgaatcgcaaacgcgtttgtgtttttatttttatgccggtgtttacaccagtcaatatatgaaataagagacgtttttgtatggagatccacatgtgatgtacaaaattggcgatgcggaaaggatgaggataagatgcttacgtttgtgttcccggggcagggttctcaatttaaaggaatgggagccggactgtttgatgaatttcaagatctgacacgtcaggctgatgacatattaggctactctatagaagaattgtgtctggaggatccgaatcaccagctggggaaaacgcaatttacccagccggcgttatatacggtgagtgcactcagttatttaaagaaaaggaaagagtccggcagagagcctgattacgccgcagggcacagtttaggagaatataatgcgttatttgcggccggctgctttgattttgagaccggtttgcagcttgtgaaaaaaagaggggagctcatgagcaaggcagctcccggaggcatggcggcggttttggggtttaccgctgaacaagtaaaagaggttctatccgattatcatctgaccggcattgatatcgctaaccacaattcaccttcgcaaattgtgatcgccggaacgaaacaagacattgaaaaagcgggccccgtctttgaaaaagccggcgtgagaatgtaccttcctttaaatgtgagcggcgccttccattcccgctatatgaaagatgctgaaaaagagttcgcggattatttagaagaaacggcgtttttgcctcttcgttttccggtgatctcaaatcttcatgccgcaccttataagaatgatgaaatcaaaacaaatctgactttgcaaatgaccaatcaggtaaagtggacggacacgatacgccgtctgatgggacttgaaaataatgaaattgcagaagtcgggcccggggaagtgctgacaaaactgacgagtcagattaaaaaagatgccgtcccattacctatgccgaaagaagagtctgatactgctgatgttaaagcatcggcagctgatccgcaaaaaacggcgggaatgagattagggaacgaagattttaaaaaagattataacatccaatatgcttacatgacgggctccatgtacaggggaattgcttcggaacagatggtcattaaagcggcaaaagcgggaatgctgggctttttcggaacgggcggattgagtatcgaacggatcggacaggccatcggcaccatccggtctgcactgcggcaaggggaaacattcggaatgaatcttcttcatcatatgatgtcacctgacaaggaagtcagaatgatagatttatatttgaaaaacggcattcatcttattgaagcatcggcatttatgggcataacccccgctcttgttatatacagggcaaagggattaagcaggaatcatgacgggtcggtgtcagttcaaaacaaaatcatcgcgaaagtatcccggcctgaagtcgctgaggcctttctgaatccggctccggctcatgtgctggaaagacttgtgtctgacaatcggctgacagccggggaagcggcgcttgcaaaagaaattccgatggctgatgacatttgcgttgaagcggattcaggagggcataccgaccaagggattccgtatacattaatgcctgccatgatcagactcagagaccgcatgatggagaagcacggttatgcgaaaaaagtaagaatcggcgcagcgggcggcatcggcactccggaagcggctgctgccgcgtttctgctcggtgccgaatttatcggaaccggttctattaatcaatgcacggtcgaagccgggacaagtgattcagtgaaagatctgcttcaggaagcgaacgtgcaggatacgtcatacgctcccgcgggagatatgtttgaagcgggagcaagggtgcaggtgctgaaaaaaggcctgtttttcccggcaagagccaataaactctttgacttgtacagacaatacaattctttagatgaaatagatgaaaaaacgaaaacattaattgaagaaaagtatttccagcgcagttttgaagaagtgtatgagcagttgaaacgtgataaatctcctgagcagatcgccaaagccgaacagaatccgaaacacaaaatggcgatggtatttaaatggtatttttctcatacgacaaggctcgctctggaaggaaaaagcgaaagtaaaatagattaccaaattcattgcggccctgcgctcggcgcgtttaatcaatgggtgaaaggaaccccgcttgaaaattggagaaacaggcatgtcgatctgatcggcaaacagctcatggaagaaacagccggccttcttgcgcaaaggctggtatcgattacaggctgagtatgaccagacattacattttttctgcggaggacagaccatgctgattgaaaatcatgaattaacgatgagccatgtcgggttagggaatttgaatgagtacgcgctgctgctgttattcggcaacgcacacagtcaccatttaacggacggaacaggattccggcctgatcagatggccgatcaccaagggctgattttgtatccggcttattttatgacacatctcaaagttccttcagatcagcctcttgatcagtaccgattatgggacgaggtttccgtcggagtcgatatctcccggtttggagaaaccatattagaatctgattatttgttcgggccgaaaggagcggtcagctctgataaaagcgagtgggaccggggacggtttccttctatgaaagccaatagtttaattgtcgtcgacgtcacacaaacagaaggttcgacgcgcaaagtctcagcgcctaaggctgaatgcattgcggaactttctaagctagccaagccgccttacgcgctgatgcggtcaaagaaaatcagaacggacgccttcggtatgaagccgggcaatctcaaaacagcagaccccgttttatatcgggttcctattgatcaggatgctgcgcccgggcatgccatggtgtttgcgaaattcagcaagataatggatacggcggaatttgaatggatgacgcgccggtcgaagccgggttttccggtttcaatcgcgcggcatttatttttgcttgaaagagagacgtattattacggaaattgttttgcagatgaagagcttgatatttatatgacgggacacattgaagaatgcgatcccgactttcacggtgagtccctcggtatgatctcagtggcgaaaatcagctatcagattgaagtctatatgaaaagaaatcatacattgctggccatttccaaggtggacaagctgctggcggtgccgacctcttcacaagatcatattccggattataagcgggtcatcagaagtttataaaatgaagaatggagctgaaagcaaatggaacaaaccaaggaaatgaagcagatcatcgcacaaatcattcaggacattcaagaacagcagtcatatcgggccgtcgaagcgggggatgatgtgagagtcatagaggatctgggcttctcatcactggatatcgctcaattagtcgcacagatggagatggaaaccggagtagatcctttttcccaaggagaaacgatttccagcattacaaccgtcggcagcatttgtgatatttatcaaaaatatatggacagtgctcaatcatgaaaacagaaagcgggggagatatcagctgggtgactgataagcttagggaaacgcaagacagtgagtttctcatttttaaagggcagacttttacgtatgatgatttgctgacacgaatcagcttttttcagaaagaacttgaacaaaacggaatacgtgaaggagaatgtgtggcgcttatcggggattattccccgaacgccatttttttgctgatggcgcttttgttaaaccgaaatatcgttgtccctctcagcaatgaatcaagggaaaagcatctcgatatgtttgaagacgcgaaagtgaatcaaatcattgaaataaatgaaaatgacagctggacgcttcgtgcaggttctgaaagcgcctctcaccctctgcttgatgacctgcgcgagagaggggagtcaggcattattattttcacatcgggaacttccggcaaaagcaaagcatccgtgttaagcgccggccggctgcttgaaaaatataaaacggcgaagagaaaaccgctgcgtacgctcatttttctgaaattggatcatatcggcggcattaatacgctgtttgcgattctgtttaacggggggaccatcgtcacatcagacagcagaacgccggagtccgtttatcaggcggtcgacaagcatgctgtccaagtgctccccgccaccccgacctttttaaacatgctgctgatgtccaaggcggatgccggctataacctctcttcactccggctgatcacttacggcacagaaccgatgccccaatcaacgctgcgcggcattcaccggctgtttccggatgtacggctgaaacaaacatatggattaactgaactgggtatattctcaacgaaatcaaaagacagccaatccacttggatgaaagtgggcggtgccggaacagagaccaaaattaccggaggcacgctttgggtccgttctgagtcggcgatgctcggctatttaaacgcaccgtcacctttcgatgaagacggctggtatgacaccggtgaccaggtggaaacagacggcgaatatataagaatccttggaagaaagagtgaaatcattaatgtgggcggagagaaagtgtttccggcagaggtggaaagcgtctttctggagataccgaatgtccgggatgttctcataacgggaagaaaaaatccgattacgggcgagattgttgcggcagaggccgtgcttgaaaaagaggaagatatcaaatctttcagaaagcgggccgtagctcattgcaaacagaagctgcagccatatcagataccgcagatcatctctgttacagatcggaaactgtctaatgaccgatttaaaaaaataagaaacgtgtaaaacaggaggcaaatatgaataacggaaaagtagcggtcgtcagcggaggaagccgggggctcggaaaagcgattgtacagacgcttttggatgaggattacaaagtagccgctttcagccgcagtgaatctgattttattaacacattgagagagagtgaaaagtaccgcggccgcttttattgggaagcggcggatgcggcggatgatgccgccatgaaacagtttgttcttcaagtataccgcaagttttccagaatagacggcttggtcaataacgccggtttgaaccttgatcagctgctgcccctgaccaatgatgaagacattgaccgcatcctcaatctgaatatcggctcagtcatcaagctgacccgaaacgtatcccgtgtcatgctgaaacaaaattccggatcaatcgttaacataagctccattatcggctcaagaggatttaaaggcacttcagtttacagcgcatccaaagcggctcttgacggcttgacgcgaagcctggccagggagctcgggtctaaaggaatccgtgtcaattcacttgcgcccggttttgtggacaccgatatgacgaaaaatatgccggaaaaacaaaaatcgcagattatcagaaggacgccgatggggcgtttaggcgaaacagacgatatgaccggactcgttcgtttcctgctttctcctgaatcgtcctttatgaccggacagacaatggcaatagacggcggattaacttgttaaagcacagaaaaattcttttgtacaagggatggtatcctcatgaaatgtattaacgaatttttaagaacggtaatagcgcaaaagctgggtgccgaggtgaccgaagcggaagataaaaccgctttttttactcttggcgtgacgtctctcatcagtgaagaaatcatgaccatattgcataaagaatttaccggcctttctgaaacgctgctgtttgaatatccgaacattgagaaattgagtgagtttttaagtgcgcagaaacgaaatcccgaaagcgttcttgaattcaaagaaacggagcctgatacgggaagccggcaggaagaagaattgcttcccgtacaggcggctgaaaaggtgcctgtacaggaaacggacgggagctctgatattgcggttatcggaatgagcgggatgtttccgaaagcggaaaaccagcatgatttttggaacaatttaatggaaaataaagattgtgtcactgaaatcccagaggacagatgggacagctcttattactcggaagagaaaacggcagaatacgcgtcatacagtaaatggggaggttttattgatcatccggatcaatttgacccgctgtttttttctgtttccccgtgggaagctgatttaatggaccctcagcaaaaattgtatgtcacgtgctgctgggaagcgatggaggatgccggttacgggaatccggcggcgaggccgacggatcaaatcggtgtattcgccggagtgacctggaatgaatattcattaattgcacacgaagaaggtttcctcaaagatcagtacaaaggccccggctccttatattggggcattccgaaccgggtttcttatttccttgatctccatggcccgagcatcgctgttgatacggcgtgttcttcatcgcttgtcgccgtccatcaggcttgtcaggccattatgtcgggcgactgtgaaatggcgcttgccggaggcgtcaacctcagcttacatccgcaaaaatacatgtttttaagccaatcgcattttctgtcttctgaaggaaaatgccgcagtttcggtgaaggcggagacggttacgtgcccggtgaaggtgcgggagccgttttgttaaaaccattgaaaaaagcgattgcggacaacgaccacatctacggtgtcattaaggggtccgccactaatcacggcggcaaaacgaccgggtatacggtgccgaatccggaagcgcaccgggacctgattttatccgctctaaacagagccgcggtaagtccggcggatatcagctacattgaagctcacggaaccggcacggcactcggcgatccgattgagatacgcggcctgtctatggcatttgataaacagaccgatgagaaaaactactgcggaatcggctcggtgaaatccaatatcggacatttggaagcggctgcagggatcgccggtttaatcaaggtgcttttaagcatgaaacatgaaacgcttcccgccagtctgcactccgaggaactgaaccgcaagatttctttttctgattcgccattttatgtcgtccgaaacaaccggccgtggccggctgaaggaaataaaccgagaatcgccgcaatcagttcattcggcgcaggaggctctaatgcccatctgatcgtaggtgcttatcagccaaaacggcaagcggacgggaatactgagcaaaaaccgcatgccgtcgtattaagcgcacattccgaacagcagctgaaagaatatgccgggaaattaagctcttttcttgcccgattggaaaacctgccttctgccggcggatacagtctggaaaatatcgctgccaccttattgtcaggcagagagcctttctccttccggcttgctgtcattgcatcatccctttctgagctgaaacagcgattggacggatttgtaagcggtcacagcgacggcaggcatatgtacttcggaaaagcgtcacccgggcggccggacgtttcaggccaatccgtttcagatcctgagaaatttgccgcgctgtgggtgaaaggccttcagtgttgcaaaaagccggaaacgccgtatcagaaagtcccgcttcctacgtatccgtttttaaaggaaacgtcctggctgaccgatcaaaaaaagcggtatacaaaaaagccccaaaatatcaaaaggcgtgaagcgctgcatcctctgcttgatgagaatatttcatccgcccggaaagggacgtttcaaaagatattttccaaggatgaatatttctttaaagatcatttagtgaacgaaaaatatgtgcttcccggagtctgtcatctggaaatggcggcatacggcgcgggattgtggggagaacgcccggtcgtctctcttcaaagtgtgtggtacatggagccgattgtgacagggacagacccaagatccgtcatgatagagtttgaagcagaaaaagagcgtataagctatgtcattaaagaaaaaggagcggacggcaccctcttttcgcaaggagaagtgatttgtaaagaaaaaggagcgtcttttgaggccccggcctttcagctcccggcgccatttgcgcagagaacggagccagaagacatctatcactcgttctctgaggcgggaatcgtgcaaaaggacagttttcaggtcatccgcgaattctcttatacagaaaggaaagcactggccaaattaacgctcccgtcacacttggaagccgattttaaacagtacatcctacatccgtccttaatggatggcgctgttcaaactgcaatggcgcatgtgctgcaatttcaaaaagagcctgtgcttatcgtaccgttttccttcggagaaatacagctgcttgaaccgttagcgaaaaccgtatttgtgcatgcggaggtaaaagcggcctctgttcaccaatttgatctgcatatttgtgatgagcgcggcgtgctgttggcggcagtgaaagattttatcataaaagaggtgcaggaaagcgccgggtttaaccaaaaagccggcgtcacgccgaagaaaagctgtgaaacggaattgcttatgacaccggtttggaacaccgtcaccattccggaaaccggcatgtctttcatgcgtgaagaaaaaataatcgtcatcggggccgggccggattttcagcaggctttgaaagagatgtattccgatgtccgttttccggacatcacttctttggatagcgcggaacaaatggctgaaacattgaaagcgcaaggctcttttcaacacatgatatgggcggcgccggatcatcccattccatccgtttatgatgcggatacggccgagggacaggagcacggggtcatgcagcttttccggctggtaaaagcgcttctgcttctgaattttgacacggaacaactatcattgacaatctgcacgtttcaagcacagccgattcatgaacatgatgaggtcaatccgagtcatgcaagcatacacggattagcggggtcgctcgcaaaagaatacagcaattggagcatccggcttcttgatttggaatctcaaaggggagaccggcatctccccgatgtcttctctttaccggcggactccgagggaaatccgtgggtctttcgtgcaggtcagtggcaccgacagcaattggccgtctgccagcctcatgcagatgagccttcattataccggcacggcggggtttatgtgattatcggcggagcaggcggaataggagaagtatggactgaatatatgattcagacctatcaggcgaaaattatctggatcgggagacggaaaaaagatacacagattgaaagaaagctgaaaagacttgcggctttaggccccgcaccgcaatatttcagcgcggatgctgccgattatgactctctcaaacgggcgtatgacaccattgtaaaggaaaatggaaaggtccgcggaatcatccattccgccatcgtgttatcagaccgcagttttgccaatatggaagaggatcagttccgcgcgtcactttctgcaaaaactgatgtgagcttgcagattgcccgggtagctgaaggggaacccctggatttcttgctgtttttctcttcgatgatgtcgtttcaaaaagcgccgggacagagcaattatgccgccgggtgcacgtttaaagacgcttttgctaagcggatctcacagaaagcgccgtatgccgtaaaagttgtcaattggggcttttggggaagtgtcggcgttgtcgcttcagaacaataccggaaacggatggagcgggacggaatcgcttctattgaggcgcccgaagcgatgaaaacgctggaaaccctgctttccggacctcatgaccagctggcgctgatcaaaacgacagatccggtttttatgaaagacgatctgaaagaacaagtaacggtttatccggaaaagattccttccgcactcggacaattagcggttaacatcacgcagaatgacgaagctgagcggttaaaagcatcaagtgtcatgagctgcatgagagagatggaatcccttattgaaaaaatgcttgcatcaaccctttatgagatgggagccgggcttgatcaggctttgccgttatttcaatcggctgccggcataacggaacaatacagcagatggctgaaagagagctttgtcctcttgactgaattagcgcttgctccggaaaaaacggatctagggcaggtgtgggaggaatgggagcggaaaaaagagacttggctgcgccagaaagacatgagggcgcatgtcagattggcagaagagacattgcgtgtgcttccagacattttaaccggaaagcttccggcaacggaagtgatgttccctgactcctccttccgtcttgtggaaggcatttaccgcaataatatcatttctgattttttcaatgacaagcttgctgacacattgattgcagttttgaaggaacgtctggaaaaagacccgcaggcgaaaatccgcattttagaaatcggagccggaacaggcgggacgagcgccgcggtcatgagaaaattgaaaccgtatgaagcgcatattgccgaatattgtttcacggatatttctaaagcatttcttttacatgcagaagacatattcggtccggaatatccttatgtcacttataaaatattcaacgctgagcagccggtatcaacagaagcgccggacatcggcacgtatgacgcagtgatcgcgaccaatgtgcttcatgcgacaaaaaatatccgctctacgctgcgccatgcgaaagcaatgctgcaaaaaaacggccagctgttaataaatgagatcaacagccgcaccatattcaaccatgtgacgttcggccttcttgaaggctggtggctgtatgaggatcatgatttacggattccgggctgtccgggggttgatccggccggctgggcggaagcgctttcgcttgaaggattcgtccatcctctgtttccggctgaaaccgcacacgacttaggccagcagattatagcggctgaaagtgacggaacggtcaggcttgccctcacgcaggcgtcagaagagaagccggagcgccgtccgtatgacgcagaaggtctttcggatgatactttgcacttcagcctgagagaaaaaagcgttgaactgatgaagaaggtaatcggtgaagcgcttaaagtgccggcgcatcgtcttttatcccatgaacctttaaccgcatacggattggattccatactggtcgtcagactgaccaacgcgttaaaagacgtcttcggttctgtcagcagcactttattttttgaatatcaaaccattgatgagcttgctgattactttctgtcttcccgtaaagaagcgctcgagcggcaattcgggaatggacgggctcatcccgaaaacgccggacgggtgcaggctcccgcagaaagcgccgcgccgattccaaacgtaagagaacggggcatcgcatatctgacggaattaataggaaaaacgttgaagattccgagcgggagaatggatccgtcggtttccttaaccgcatacggtttggattctattctggtcgtcaggctcacaaatgcctttcgtaacgtgtttgaccaaatgaccagcaccctcttttttgaatatcagacgatagaagaaatcgcggattacctgcttctttctcagccggaagcatttatgaaagcgatgggtgtgcgtgaggcacagctggctgatcacacagataatctgaatgtaaaacaaaacaagattcctcaaaacgaggaaggcagcaggacgaacggagatccctatatccaggatatcgctgtcatcggtctgtcaggccggtatccgggcgccgatcacgttgatgagctgtgggaaaatgtaaaagccggcaggcattctattactgaagtgccgaaagatcgctgggactggaaaacgttttataacgaggaacgcggaaaatgggggtccatttattcaaaatggggcggttttctcgatgacattgataaatttgatccgctgtttttccgtatatctcccgcggaagctgaaaggatggatccgcaggaaaggttgtttctgcagactgcttattcaagcattgaagatgcggggtacaccccggccacgctttgtgacagccggaaaatcggagtctttgtcggtgtgatgaacagcaattacccgacagttcccagcgactggtctatcgcaaacagagtatcgtttttgttcaatttccaagggccgagtatggctgtggatacagcctgctcttcttctttaacagctgtccatctcgccgcagaaagcctgcggagcggaatgagtgaaacagcgattgccggcggagtcaatcttatcgttgatccggcccactatgagcggctgtccgctttttcaatgctgtctcccggtgataaatgcaaatctttcggagacagtgcggacggttttgttgacggtgaaggagtaggggcgattgtgttaaagccgcttgctcaagcggagaaagacggcgatcatatttacggcgttatcaaaggaagcatgctgaacgcagcaggcaggacaaacgcttatatggtgccaaatccgaaagcgcagtttgatctgatcgcagagacgttgaaacggacagacattcacccgagaacggtcagttacttggaagcccacggaacgggcactgcgctcggtgatccgattgaaatcgacgggttaacgaaagcttttcgcctgacaacagaagaccggcagttttgttccatcggttccattaaatcaaatatcggacatttagaaagcgctgccgggattgcggggatcaccaaactgcttctgcaattgaaacataagaggattgccccttcattgcatgcggcggaattgaatccgaatattgagtttgagcacactccgtttttcgtacagcaaaaagaaacggaatggaaacgacctgtcttgaatatcacgggtaaaatgaaggaatatccgagaattgccggcatttcctcgtttggagcaggaggttcaaacgcacatgtcatcattcaggaatatgtgccgtctgacagcctgaaaccaatggaaaacgcgtctgtttctccgcaaaaaccggctgttatcattttatcagcgcgaaatgagcagcaattatcagagcgcgcccgccagcttctggatgatgtcataagaaaaaaacgttctgacggggatttggccaagatcgcttacacgcttcaggcgggaagagaaccgatggctgagcggcttgcatttacggccgagtcgatagaagaactgaaaatgaagcttatgagtttctcaaacgatcataatatcgaacatgctcatatctggcggggcaggacagccaaacatcattcattggcggcttcgctcacttctgatgaagatatggcgcttaccataaatgcctggctgagaaaagggaaatacggaaagctgcttgacctttgggttaaaggacttgacgtcgattggtcagctctttatcagtgcaacccgggccgcatcagtctcccggcctacccttttgccaaagaccgatattgggtcacaaaagctgatgtgtcacttgacaaaacaggctcagcgaaaagtgagaaagcagccagacttcacccgctgctccacgcgaatacatcgacctttaccgcccagcgttttacttctgttttttcaggacatgaaccgttttttgccgatcacatcgtcaatggaaaaccggtgcttccgggcgcggctgctttagaaatggcccgggccgccgttacatttgccgccgaagacttgccgggcgggaaaacgggtgtaaggctcaaacagatcgtttggctccgtccggtgacggcgctttctgaaggagtgacgcttcatgtaaagcttcagccggaagaaaacggagacatcgcttttgaagcgtatgccgaaggagaagagccgcttgtctttttccagggaaaggccgtgctcgaagagacggagcgtgctcctgttctcgatgtagaagcggttcaggcgcgctgcggcggccgtcacttgtcaaaggctgagtgctatgaagcgttcgacagcctcggcatcacctacggaccgtctcatcaggcgcttgacgccgtctatgccggaagcggagaagtgctcgcaaagctcactcttccgccgtccgcccgcgaagaaaaggagccgttcatcctgcatccgagcatgctggacgccgcccttcaggcttctatcggtctcgtgctctcagacggttccgcgtctggacggccgtttctgccgtttgccctccaggatatgcaggtgttttctgcgtgccgggagacgatgtgggcggtgctttcctcagcggacggcgcctatcatattgagctgtgtgatgaaaacggtgcggtatgtgtccgattgacggggctcaccgcccgttttctggaagaggaaacggaggaaaaaccgctcttgcttcagccaaagtggcaggaatcaccgccggatgaaggcggcggacaagaagagtctttcagatacgtgacactgtatggcggaatgaacgctgaggacataagcggcgccgtatgtgcggctgacggcgaaggtccgattgaagaccgttatgacgcctgcgcggcggagctgtcagcgatcgtcacgcgtcttatcaaagaaaaacagaagaaaaaaacgctgatccagcttcttgtccccgacaggggggaagacaatgtattggcggggctggccgcttttctgaaaacggctcaccttgaacatccgaagctgtacggccaagtcatccaagccgatccggacgagtcagcctcggcgcttcttgccaagctgaaagaaaaccgggcgcatcctgaacaagcggaaatccgttatgaagccggcaaacgtctcgtcagaaactggcgtcatctgccggcgcctcaaagcggcgccgttccgtggaaagacgaaggggtctacctccttaccgggggagcgggcggcatcggcctcattgtcgctgaagaaatagccttccgcgtcaaaaacgccgttctcgtattaacgggaagggcggaagcgcttgataaagaccgctccgcccgcttacggcgcttggcagcgacgggtgcccgcgtattgtatcaaccggttgacgtgacagacagggcggcggtcatcaccctcgtccgcggcatacaggaggagcacggaacactcgacgggatcattcacggcgccggcgtgatcgctgacaattacattctgaaccagacagaaaacgaacggaagaccgtcatggcgccgaaggtgaaagggcttatcaatcttgatgaagcagcgaaagatgtgcggctggactttttcattctgttttcttccttggctggaggtatgggaaatccggggcaggccggttatgcggcagccaacgcatttatggatgtttatgcagcccgccggaaccgtctcgtgcgggacaacgagcggagcgggcagaccctgtccgtcaactggccgctttgggaagaaggcggtatgcgtgtggacaaagagaccgaacggctgatgtacgaacagaccggaatgaaagccatgcgatcggcctcaggcatccaagcgctttacgccgcttttgcctccggagaacaccaggtcatggtggcagaaggcgacgaaaaacggattcgaaaaaacctgatgcctgaaacaccggaaccgtccaatcgcattcatgtgtcaaggaagacgcccgtccatataccgaataaagtacaagcggaactcaaacatatgatatcaggcattctgaaggtgaaagaagacgagatagatgctgaatcagagatgagagattatggctttgattcggtttcattcacgcagtttgcaaatgaactaaataaaacgtatgggcttgaactgacaccggccgtattttttgaatacccgacagtctttcgttttgcccaatacttgctgacggaacatccggatacattcggctcacaggaagaaacagaaacggagaaaccggttgtgcgtaaaaaaatgaagacggagccattcttgattccgtcccgtcttcctaaaacaaaaaccgcagctgcacctgagcccgtggcgataatcggaatcagctgtgcatttccaatggctgaaaatccggaaatgttttgggagaatttagccggagaaaaggactgcatttctgaaataccgccggagcgctgggactggagacagtattacggagatccgcagaaagataaaaatgcgagcaatgtaaagtggggcggcttcattgatgaaaccgctcaatttgaccctttatttttcggtatttctccgcatgaagccgaaatgatggatcctcagcaaagacttttaatgatgcatgtatggaaagcgattgaagatgcaggctgctctgccaaaagcctgtcaggtacaaatacaggcatttttgcaggcacgacaaacagcggttacgctcaggaagcttcaaagttccatatagagattgagggttcttccgccgccggtacggttccgtcaatcggtccgaaccgtatgagctattttctgaatatacatgggccgagcgaaccgattgaaaccgcctgttcaagctcattggtcgctgttcaccgtgcggtcagggcaattcaggccggagactgcggcatcgcgattgcaggaggcgtcaatgctattgtatcgccggatatgcatatcagctttaataaagcgggaatgctcagtgaagacgggcgatgcaaaacattttccgatcaagcggacgggtatgtcagagctgaaggtgcgggcatgattgttttgaaaacattatccgatgcggaacgtgacggcgaccgtatttatgccgttattcgcggaacggcggaaaatcatggcggacgggcggcttcccttacatcgccgaatccgaaagcacagacagaagtcatgataaaagcttatcagcaagcgaacatcgacccccgtacagtgagttatattgaagcccacggcacgggaacggcgctcggagatccgatagaaatcaacggactcaaagcggcttttgcagcgctttatcagaaagccggagtaacggcgcccgatcagcctcattgcgccatcggttccgtcaaaacgaatatcggccacacagagcttgccgccggcatggccgggcttttaaaaattattttgcagatgcagcacaaaacgctcgttaaaagtctgcattgtgaaaccgttaatccgtatatcagcctcgacggcagcccgttttatttcgtccgccacactcagccgtggaaagctgcgactgatgatagcggaaatgaactgccgcggagagcgggtgtcagctcgttcggatttggcggtgtcaatgctcatgtcgtgctcgaagaatatgtttctcctgttgaagagaagcaatggacggccggtgaacttcagccgtccttattcattctctcggcaaagacggcggaacagctgaaggaacgtgcggaacagctgtgcagatatttggaaaagacacattcagctgacggagctcttgcgggtatcgcttatacgcttcagcttggccgggatgaaatggaagagcgtcttgccgtcattgctgaaacaaaagaagagcttacgaacgcgctgaatgatttcctcagcggcaaggagacggggcagaatttctttacaggccggaacaaagcgatgaaacagctgtttacagagatgacggacaacgcagaaatgagcgggaccgtagatcaatggattgaagcaggaaagtatacaatgcttgcaaaattatgggtgcaaggtttacatgtcgactggaataaattatatccggacgaaaggccaaaaaaagtcagcctgcccgtctatccttttgcgaaaacacattgctggataccgcacagtgcgcagcatataaggcaccgggagacttatgagactgatacgtccccgcttgagacttatgagcgcctgcttgatgatttggagaaaaacgaaataagcatagaaaccgctgtaaaaagaacgatcggtttttacagggattagcgtaatggaggaaaccatatgaaagagtttctgcaccgggttttttctgacgtcaaaaataaaaaaatgacaaaacaggatgcgatcggcattttgcgcgattatgatatgcggatgggacttcgccaagcggcttcccttcatccgcttgctcagcagcatatttccgatgaaacgggacagggattctcggcagctttcagcggccgggaattttttctcgctgatgtttctttacagcgtaaaaagcttatgcccggagaacttcttttggaaatggcgagagctgcggctgttttgacagtaaaggagactgaggctgtccggctgacgcatatcgtgtggtcaaagcccattctgactgaggctgagccgttccatatcgaaatcaggctgatacccgcagagggtgaagccaaaaggtttgagatttataatccattttctgccgatttcagtcatcatgatgtgtacagccaagggacgattcagccagttgatgctgcgcctggcatgctggatatcagccgcttgaaggaaaacagcggttccctgatggatcagcagcaaattgaagccatcactcagaacgataccgttcaatacagtgagcacatgaaaggaatagagcgtatttacgcctcagcaggacggatgctggcagacatatcaattccattgacagaccaaaaagaatccgcacgattcggcctccctccctgtgtgatgcaaagtgtgacagaggcatgcgcgctgcttggcggcaaagaatataaaacgctcgccccggtttcattggacgagcttttgttttatgaaccttgtcctgacaagggatgggccgagatacaagagaaggcggggagcttttatattgatttatgtgacgaagaaggaaaaatatgggcttccctatcagggttgaagctgcagcctgtcatcaagacgggcgctcccggaaaaaccaatgccgaacaccgcagtgaacgtttgtatgaacaaacgcttcttcagctcaaaacgctgtttgccctgactacaaaaattgctgtttccaacatagacactgaagagccgctggaaacctacggaatcgactcagttactgtgacgaaattgaaccgcgaattgtctctgcttttcggtgacctttccaaaacggttttttacgaatataagacactgggctccctggcagctcactttgtcacggattatccaaaagaatgccgaaaatggacaaatgatgatgaccaccgttcaggcatatcagaacaggttttggcaaatgaagattttccggtgcttccgtcgtttatcaagcgaaagaaacggccttctttttccaatgagaaccagacaaaagaagggattgcgattatcggagtcagcggacgttatccgcaagctgaaacacttgaagagtactggaataacttagcggccggaaaagactgtgtgacggaaattcccgaagagcgctgggcaaaggacaagtactacaaccctgatcctgaagcggccgtgaaagaagggaaaagttacagtaagcggggcggaattctgaaagatgccgctttctttgatccgctgttttttcaaatttcaccccgtgatgctttgaatatggacccgcaggagcgtctctttattgaaatgtgctggcaggtgctggaggatgccggttatacgaaggaacagcttgagaatctgtataacggccgggtcggcgtttttgcgggcattacgaaaaacgggtacggaatgtactggaaaaacggcggcgccctgcagccgaaaacgtcgttcagttcagcggccaacagagtttcctattttcttaatctgaaagggccgagcatgccggtcgacacgatgtgctcatcttcgctgactgcaattcacgaagcgtgtgaaaacatccttcgcggcgaatgcgacatggcgattgccggcggtgtgaatgtgtatacgcatccttcggcttatgcggagctcagcgcctatcgaatgctttcaaaagacggaacgtgcaaaagtttcggtgaaggcggggacggatttgttcccggtgaaggtgtcggggccgtgctgttaaagccgctgtcaaaagcgatggctgataaggaccatatttacggggtgattcgcggcactcatatcaatcacggcggcagaacaaacggatatacagtgccgagtccgagcgcccaggctgacgtgatttccggcgcgcttgaaaaatcaggaatacatccgcggatgatcagctgtatcgaagcacacggcacgggtactgaactcggagatccgatcgagattgacggtttgacccgcgcatttcaaacgaaaacgtcagataaaggtttttgcgccatcagctcagttaaatccaatatcgggcatttggaagccgcggcaggcattgccggtgtaacgaaactgctgctccagcttcaaaaacgaaagctggctccctcattacattgcagaaaattgaatccgaatattgcattcgaccggacgccgtttgtggtgcagcgtgaattggcagactggaaacggccggtcattgaggaaaacggagcgcaaaaagagattccgagaatcgcgggaatctcttcttttggcgcgggcggggcaaatgcccacatattgatagaagaatatattgaacctgatagggagatttatgagccattcacagatgaagatcccgcagtcattttattatccgccaaacaggaggccagcctgaagcagcgggcgcagcagctttttcaagcgatcagaaaaaatgacgtcacagaccgcagcctccgggatgcggcttacacccttcaaaccggaagagaagcgatggaagaacgtgcggcgtttatcgtgacgtcgacagagcagttagcggaaaaactgcagcgttttattgacggcgggacagacggctgcttcaggggaaaaagcaaacagtataaagacattctagccgtttttaaggatgaagatatgcaggaagccgttcgtaaatggatgaaaagaaaaaaattcgcgaagcttctggaactttgggtaaaagggctgaagattgaatggtcagagctttataacggcagcctgccgcatcgcatcagccttcccggttatccatttataaaggatcggtattggccggacgatgcagcgccggacaatgttcgtgatgctgaaacacattctgaaacatttcgtgaaatccgctttttacagaaaagctgggcagaaagcagccgtgttccggctaaggaagtgcggggcgtcatcggaatagctgctgatcaccagacaggaaatttagccgttgagctgtcccgttatttccccgagtctgaaatcattgacgctgcatcaccggaaatatccggggacgcggcccgatttggcggtctgattgatgtgaccggatgcgggacggaaatcaatcatgatgacggctggattcatcgtctgcagtctctcattgacaacagaaaccgcggccgaaagcttcagctgctttgtgtgacaaaggggcttgaaccctttgcaaatgaaacgataaatctctcaggtgcaaaaaaggccggattgtaccggatgctccaaagtgagtataaggatatccgctcgcggcatatggatgcagaacggactgccgaagatcctgagctggcaaaccagatcgcagaggagttttttcgcgattctgaagacatcgaagtgtgttaccgaaacggtgtgcgctatcacgcgcggttaaaggaaacaaacagcttagctgaaaaagaattttcatttccgaaagaccatgtgctctggatcaccggagggacccgggggctcggatatttattcgcctggcattttgccgaacgatacggagtcacgaaactcgtgcttaccggaaaagaaacaatgccgccgaaagcggagtgggatgatcatatcaaacggaattccccgttttccgaaaaagtgagaagaatcagagagctcgaacaaaaaggtgtccgaacggaagtgctgtctgtatcttccggccctgaatatgagcaggctgtcagccgggtgaaagagaagatgggcccgattggaggcgtgatacacgcagcgggagccgtagatctcgatcatccggcctttatccgcaaaacgagagaacagatgatgaccgtgcttgaacctaaaacagacggactggaccttttgtatcaagcgctgcacaaggagcctctccggttttttgcgctgttttcttcagtgtccggcgtgatgccggaattaggagcgggacaaagcgattatgccatggctaacgcctatatggattattttgcggccgcaaaaggttttccggtgctgagcatccagtggccgagctggaaagaaacgggtatgggcgaatcaaaaagccgggcctatctgaaaagcggtttaaagagcatcactgacagagaagggttgagcctgtttgatgccatcatggcaggcgattgcggatctgttattatgccggccgtcattcacccggaaaaatgggagcctgaccgtctgctgctttcatccggccttactgaaacaaagcagcaggaacaggccgatacagaaagcgttaaggagtggctgacgggcatttgctgccgggaattaagactggagccgtcaagatttgaatctgatacaccgtttcaagattacggagccgattccattatgcttgcccaagtgtccagagcgatcggaaagaggatcaaagctgaccttgacccggcggtgctgtatgaataccctacggttgctgcgctggcgggatggcttgaaacagcatatcccgaaatcaaagctgccgtttcaaaaccggttcagcctgtaatcccggacgttcccaaacaaactgcagccgctgttattcagccttctggtgctagagcggcgcaggacattgctgttgtcggaatgtcctgccgttttccgggagctgaatcaatcgaagcttattggaagctgctgtctgaaggaacgtcagccattcaaagagttccgaaagagcgctggaaaacggagaaggcggattatgcgggccttttacaaaatgtaacgcattttgacccggagtttttccttattcccgaagaagacatcaaggcaatggatatccagtcctttcttatattagaagaggcgcttcatctgttcagagacagcggttactcgttacaagaaatgaaaggcaggtcagccggtgtctatttaggaggacgcggcggcagtatgcctgatgaaaaccgtctgaagcatgcaaaaaatccgatagtcgccgccggcccgaattacttggcggccaatctttctcagttctttgatttgaaggggccgagtctcgttttggatacggcctgttcttcagcgcttgtcggtatgaatatggcgatacaggcgctttcttgcggtgaaatcgactcagcggtagtcgggggagtcagtctgctggaatccggtcaaacccaccggatgttcgaacttcgcaatctgttaagcgaagagcctgcgtttcatatttttgaccgccgcaccggcggcatcgtattgggagaaggcgtcggaatggtgtatttaaaaacagcggcccaggctgtaaaagacggtgaccggattcatgcggtcattaaaggcatttccgtaaacaatgacggcagaaccgcggggcctgccacaccgaatatacaggcgcagaaagaagtgatggccaaggcgcttgccaaaagcggcagaaaagcggaggatatcagctacattgaagcaaacggttcaggctctgaagtaaccgaccttttggaactgagggcgattgaagcggtctaccgtatgcaaaacagcgcgccttgtgaattgggatcgatgaagccgaatatcggacacccgttatgcgctgaagggattgccggattcattaaaacagtgcttatgctctcgcgccgaatgcgtgtgcctttcctttcgggcaaagagccgatgacgcattacgatctgtccgcctcgccgttttatttttcgcacgctctgcgtgaatggacggattcaccgcggattgccgccgtcagcagcttcgctgacggagggacgaatgcccatgtcatagtggaagcctgggagcaggaggcgtataccccggttagaaagcctttgccgagacaggaattaaaacgccggcccatccgtccggacaaaaccgaaagcctgcatgaaaacacacataagtcccgtccgaatacgttttggaaacaaatgaagacttactgattgcgctgaaaattgaacgtcgatatggaggaagttcatatgcaagagcagcttcttattaacaatcagcatcccgttctgaaacatcataaagcctatggaaaggaactgctgccgggtctggcttatattgacctgatctatcagactttcagagaaaacggcttttttcatgccggccttgaactcaggcacttatcgatttttcaccctttagctcctgaacagggagaaacaatcctgctttccgttgactgtacagagaacggcgaagggcagtggaaggtggaggtgaaagggcaaaaacaaggtgacgaagcagcagagacaaaggtatatgccgcggcgcaaatgcattccgtcaagcccgccggcttccaagagagcgtccggatggatgccgtaaaacaaacggcggcagaaataccgcttgaggacatttacgcggaatgcagggatcaagaactggttcactcaggaatgatgaaaggctgcggaagcgtctaccaaactgaaaaagagatttatattgatctgtcggtgcaaaaggatcagctggaacatgcagaagaggcgatgtttcatcccgcattgatagatgcgagcagcatcggctccaatgtatatctcgctcctttgacgagggaggaggggcaattatttctgccgctgttttatgaatcgttttattgcaccgaattgctgcagacgacatgtatcaccaagataaaaaaagaatccgtcacccgtaagaaagatctcgtttacgtgacaatggagtttttcaatgaggaaggcagaaaagtcggcgaactgaaaaacttcgccaataaactggtgagggacccggaactgatcaatcagaaacggcaaaagaaagaacctgacgggcggaatgccgtcccggctccgcaagcggaaccggcgccttctgagccccgccgtgcggaggcttccgccggccttactgaacagtgcatcctttatttaaaagaattgcttgccgcccgattgaacaaacctgtgaaagagattgacccggatatcggctactatgaaatggggctggattctccggggctgttggacatggtaaaggaaattgaacgaaaaatcggaacgcagcttctgccgacactgttatttgaatacacgacaatcgcggaattggcgggatatttgtgcgaacattacggagccggtttcggccatgctcaaagcgggcattcaagtgctgagcctttgccccgggaaaaaaagaggacgacccaaatccgcgtgaaaaaatcggcgtcagccggaacgcagaatggagatattgcgatcgtcgggatggcgggacggtaccccggcgccaaaaatcttcgtgaattttgggcaaatttaaaaaatggagaaaacagcgtaacggaagtgcctcgttcccgctgggatacgaggacatatgagcatttgcgatcgccgtccggcaagccgatttccaaatggggcggttttatagacgatccggattgttttgatgcgaaattttttcggatttctccgcgggaggcagaagctaaagatccgcaagaacgattgtttttagaaacatgctgggaaacgattgaggatgcaggctacaccccggaaacaatcgttcagccgaaagggccgaataagagaatgaacgtcggtgtgtttgccggggtgatgcatatggattattctctcgccggcgctgaagctgcggccaaagggctggtctttccttatcccttgaactatgcgccgatcgcaaaccgggtttcatatttttgcaattttcacgggccgagcatggcggttgacacggtgtgttcgtcatctttgacggccgtccatatggcggcggaaagtctgagacgcggtgaatgtgaagcagctcttgccggaggcgtcaatttatcattgcacccgacaaaatatatcacatacggcttgatggatatgcattcgagtgacgggctgtgccgcacgttcggcgaaggaggcacaggctatgtctcagctgacggcatcggagccgtgctgctgaagccgctccacaaagccgaagaagataaggatcatatttatgcggtgataaaaggcagcgccgtcaatcacgtggggaccgtcagcgggattaccgtgccgagccccgtggcgcagggggatatgatagctgaatgtcttgaaaagacggggatcgatccccggacgatttcttatgtggaagcgcacggaaccggaacttctttaggagatccgattgaaatacaaggtcttgttaaagcttaccgcacgtttacggaggatcggcaattttgtgcgatcggttccgttaaatcgaatatcggacatgcggaatcagccgccgggatcagcgggcttcataaaacggttttgcagctgtttcacaaaacgcttgtcccttctttgcactcagagacgattaatccgtatctccgtttagaggactcgccattttacgtgcagcaaaaaaccgagtcatggaaaaggccggcgtatacagagaacggccgtgaacatgcctgcccgagacgcgcaggcatcagttcattcggggcgacgggttcaaacgttcatctcattttagaagagtacaggcctaaaaaccccggtattacggaggatcaagagagaccgtatatcgtgcctctatcagcgaaaaatccggagcggctgaaggaatacgctgcccgcctgctgatgtttctcaaagataaagcgcttgaaggaagcggtccgcttcatgacaaaagagatacaatgcaaaatcagctggaaaatgcgttgcgaggtgttctggccgaagttctgcatgttgcggccggctcggtagatgatgaacaggattggaaggaattcggcttggatgtcatgcagctgacacatttttctgagctgatgacggatcaatacgggctggcaatagacatgactgatctcatacagcatacttccgtccggactttagcagaatgtcttacaaacgatgagaaacataagaatattctttccggtcttttcggccagtcgggcttagataagcagcctgatgaatctttttccttgcggtcactggcgtatacgctgcaaacgggacggctggcaatggaagaacggcttgtttttttagtgaacgatcaagcagacctgatcaggaaattaactgaatttacagaacgaaaacagcagattgacggctgctttcaagggcggtctgatagcggaacggaaatcaggggtttcctgaatgatgatcaggatacggaggagctgatccgaaaatggatggacagcggcacttacaaaaaacttgcggagctgtggtcaaaaggatttgagatagactggacgcggctgtatcgggaggagaaaccgcgcaggatgagtctgccgacgtacccttttgcaaaggaacgatattggataccggagcccgatcatcccgtcacttccgtaaatacagaaagcaggcttcacccgctgcttcaccgcaatacatcagatttgctagaacaaaaattcagtacgatactgaacggagatgaattcttcttagccgatcatatcgtccgaaacaagcgtgttctccccggggcggcttatcttgaaatggcgagagccgcagctgaactggctgccgcgccgttagccgctggatacacggctaaaaccggcatttcgctgcggtatatcagctggatacgccaggccgttcataaaaaagagccgctgcgtatgacgacagggctttctttggaggataacggcaatgtttcatttcaagtgtacagcaatgaaaatgattcagacatttattgtgaaggaagcgctgtgattgagccgctgtctgaggcgccggttttgcatattgaacagctgaaagcgcgatgccgcaaaaaagtgctgtcaaaagaagactgttatgcggcgtttgcaaaggcggaaattgtatacggaccttcacatcaaggaattgatcacatttattgcggggaaaaagaagccttggctaaattggtgctccctgcttccgtttctgatgaggctgaacagtttgtgctccatcctagtctgatagattctgcttttcaggcggccatcggcgttatgaatgaagatcaagcgggttatccggagcagccgttaatgccttttgaattgcatgaactgaccgtttttcatccgtgcagtccaaacatgtgggcggccgtatttgtgacgcatgaaacaccggccgtacgaagaatggacattgatatatgtgatgagcgcggcaatgtgtgtgtaaggataaaaggattttctgcccggatggccgaaagtgcgccggccgtaaccgataataagcaatacgatctcccgggtaaccttaccggagccgtcaaactgatgcaggtatgggacgcggaaccgatagacaaccaaaccggcttccccatttctgaagcaaaagctgtcatcataggcggtacagacgggcaggcggacgcggttttacgattgtttcctaaagctgtgagatttgatatcggccaaagtgcttccgttgaagtgatatctgatcggctccgccgtctcggtgagattcagcatatgatctggtttgcccctcagccggctgattctcacagccatgatcaaaaaagcggggtgctgcaaattttcagagcggccaaagctcttatcggtctcgggtatggaaaagagcagctagggatgacggtgattacgcaccaagcacagcctatcacccaatatgatgaggtgcgtcccgctcattccggtgtgcacggttttgtcgggtctctcgctaaagaacatccgagctggcacatccgtctggccgatcttgaagacgggggggatttccccgcagaagacatattcagcctgccccgcgaccgtacgggtaaagcatgggtgcgcagacatcaggaatggtaccggcctcaattgcttccggtccaaagcgggccgtctgaaagtgttccttaccgctatggaggcgtatatgtcatcatcggcggtgcgggaggcatcggcgaggtttggacagattatatggtgacgacgtataaagcccgagtcgtctggatcgggaggcggccgctggacagccggatacgccaaaaaatagaccggtactggtcatcaggcccggctcccgaatatatagccgcagatgcttctgattttccatcgcttcagcgcgcctatgaacagattaaaaacacatacggcaccatcagcggcgtcgttcattcagcgatggtatttgcgaatgaaagcgtaaaagatatggaagaatcacagtttcacgccggccttgcggcgaaagtggatatttccgtcaacattgccgaagtatttgcgaaagagtctttggactttattctctttttctcttcggttatttcatatattaagaatccgaatcaaagccattatgcggcgggatgcgcatttaaagacgcatttgcccatgagctttccggacggctgtcatgccgggtcaaagtgatgaactggggttattgggagcgggctgacaatcacatttctgaagagtttgacagactgagtgcaatcggtctcgggctgatcagccgggcggaagggatgcaggcgctggaaactctgctgacgcagccgatctcccgcatggggctgatgaagctgaccaagccgattccgatcgagggaatgaaccctcatgaatttgtgactatctgattgcctgtcaaaatgacggagcaaatttaattttcttaggaggataaggttttgggtaagggagacaaacaaaaagaccgtacacagttatccttaagagcagaaataagcaatcaaatgaaagaattgaatcggcttttgctgcaagtgctgcgggtgacgctgcgttcaatgggtctgaccggcgaagcgccggcggcttcctgtctgcctttatatgaacgctggctggaagaaagcatccgtcttttagacagcgattttaaaagcggtgaaacggccgcggtttgggaagagtggcataagaagaaaaacgaatggctgaaagatccggatatgaaagcgcaggttctgctggcggataccgtcattcaagctttgcctgacattttaacaggcaaaataaaagccactgacgtgatgtttcccgattcttcaatggagcttgttgaaggaatctataagcataatattctcgctgattattacaacgatgtgctggcaaatgaagcgtgtatgtatgtggaaaatgtaatgaaaaacaatcctgaggcaaacatccgtctgctggagatcggagcgggcaccggcggaacgagcagtacactgtttaaaaagctccgcccctatcaaaaccatattcaggaatactgttataccgacttgtcaaaagcttttttaatgcatgccgaaaaggaatacggcgcggacaatccgtatttgacgtatcagctgtttaatgtggagcagcctgcggcgggccagggattacatctgcgaacctacgatatcgctattgccgcaaacgtgctgcatgccaccaaaaatatccggaaaaccttacggacggcaaaagccgtattgaaaaaggacggtttgctgctcgttaatgaactgggcgggcatacgccgtttacacatgttacattcggcttattagagggctggtggctgtacgaagacgaggcgctgcggattccggggtgtcccggtctttatccggaaacatggaaatccgttttaatggctgaaggttttcattccattcaatttccggctgaaaacgaacgtctgcacacccagcagattatcacggcgaaaagcaacggagtcatcaggcagagcagggaagcttacaccgcgcaaaagcgccaatcaaacgtaccgcaaacatcctctgatcgtcagctccccatcaaacaagcgggagaggggctttcggaaaagacagcggcttttctgataaaggctgcggcaaaagtattaaaaatgccggcagaagagataaatccgctggcttctctggatgaatacggcattgactctattctgatcgttcagctgacgaatgagctgcgggatctcgtccctgatatcagtagcacgctgttttttgaataccggacgataggagagcttgccgcattcttggctgaaacgaaggagcgcgaactgcatgcgcaattttctgaagaagtccgtcatactgaagcggcatcatccggctctttgcttgaaaaaagcacagagtacctgaaacagatcgtcagcgccatcttaaagatgccgattgaggacgttcaagcccatacgccccttgaagaatacggaatcgattccatcttaatcgtacagctgaccaaccgcgtgcgggaagacgtccctgatatcagcagcactttgttcttcgagtatccgacaatcggcgaattagcggactatctcgtcagctcaagacaggaagatatggctgggattttaagaacaaataaagaagccgaaaaggcgccgcacactttacagaaaaagcaaagccgtaaacaaagcgccggattgacgaagcgccaagcggcatctttttctgaaaaagcgccgcccgcttccgaaccgccgtcaaaacactttgaagtggcaattgtcggtcttgccggacggtatcccggagctgaaaatgttaatgagttctgggaacggttaaagaccggtgaacacggaatcaccgaaattccgaaagaccgctgggattggcgggactactatgatgagacaaaaggtaaggaaggccggatgtatacaaagtggggcggctttttaacagatattgataaatttgatccgctgttttttaaaatctccccgaaagaagcggagcgcatggacccgcaggagagactgtttctggaaaccgcttatgcggccctggaggatgccggatatacccctgattcactatgcgccggtaaaaaggttggtgtctttgcgggtgttatgaacggcaactatccgacaggggcccactaccactttatcccgaaccgcgtatcctatgtgtttgattttcacggtccgagcatcgcggtcgataccgcatgctcctcatccttaaccgccattcatctcgccgcagaaagcatcagaacaggtgcatctgaatgcgcgattgccggcggcgtaaacctgattacagatccggttcattatatcggactttcttctatgagaatgctgtcaccgtcaaacgcgtgcaaagcgttcggtgataaggctgacgggtttgttgacggagagggcgtcggctgtatcgtgttaaagccgttgaaaaaggctgttgaagatcatgatcatatatacggtgtcattaaaggaagcgctctgaacgccggcggcaaaacgaacgggttcaccgttccgaatccgaaagcacaaggagaagtgatcgcagacgcgatggagcgggcagggattgacccgagagcaatcagctatctggaagcccacggcaccggcacttccttgggagatccgattgaaatcgcagggttaaccaaggctttccgccgctatacggatgcaaagcaattttgttccatcggttctgttaaatccaatatcggacacctggaaagtgcggcgggcattgctgcggtcaccaaaattcttcttcagatgaaacacggatatctggtgccgtcgctgcattcaaagcagctgaacccggaaattgattttgaaacttctccttttatcgtgcagcaggaaacggcggaatggagacggccggtcatagaatctgaaggagtaacacgggaatatccgagaatcgcgggtacatcttctttcggagcgggcggtgcaaatgcccacctgctgatagaagagtatgaaccggctgaaatgacttcggcagacaccggccgtccggcgctttttgttttatcggcaaaagataaagaccgcttgcgcgagcgggctctgttgctgtcggatgccgccggacacggaacaattacagatgcgaatctgcttgacgcggcatttacccttcaagtcggcagggtcccgatggaagaacggctggcgatgacagcggactctgtttctgaattggaacagaagctgattgcttttctgaataattccggttctgtaagcggggtgtttacgggccggagtgatagtgctgtcacggagacgggaggcacagtcagtgaatggatggaaaaacgtcaatttgacagtcttttgaatgcctgggttcacggggcgcccgtcgattgggcatctttatataaaggcgcgctgccgcatcgtatcagtctgccgtcttatccatttgcaaaagaaagctactggatgaagcgggaagaaccaaaaacaggaacaactgaatatgtgcatcctttcctgcatgaaaatacgtcaaccttggcggagcaaagctatcatacatcttttacaggccgggaacacgttttccaggatgtgagcggggagcgggttttgtcggcagccgtttatttagaaatggcgcttgcggcttttcatcatgcggcagacagctctgaagaaaaagagatatggatccgaacggcggcatggactgacccgattaccggcggacatcacggtgcgggcatcaatctctcccttctgtctgaagacgaggaaggcatccattatgaaatatacagtgacgaagagaagctgcatcattatggaatcatcggacaagggaacatacagccatcccgcgtgcttgatattgcctccttacaaaaagactgccgcccgctgtcattcgattatgaaacaccaggcacatcaggtgtaacgatcagtaaggagttccgcaccgttgaaaagctttatgcgggagaaagtgcggtttgggcgaagcttgctctcacagatgaaagcggctgtaatccgggatatcatctgccgccggaatttctggacgcagcttttcatgtcctggccaaaacggagccgtcagtccatatcgtgcctgaagcggttgaagaactgcgcgtcatgcgtccgtgctcatccggcatgtggatgtatattaataaaaagaatcaaaccggctgtgacattcaattttgtgacgaaaccggcactgtctgcgcagaaatcaaagggataagaatgagacagccgtctcagcaggatcacgggcaagaggaacaatccgagatgatgatatttgaagaaatgtggaagcagcagcctctgaagaaatctattcatgaagagctgaaaacggtcatctgttttcttacgggagaagctgccagaaagcatgcttatcagtctttacaaaccctttatccgggagccggcgtgttttttatttcacagggtgaggaaactcaaaagctttcaaacacgcattatcaaattaaaatcactgacggacaagcatatcaagaaacgtttcggcatattgaaacggctgcaggcaaagcggatgccgttttatatggatggccgcttgaagatgaaaaggccgtgaaagactattccgttctgtatcatgtgatccgcgcagctgcttctttgcgttctaaaccgaggcggatccttctttccgctcagtgcgggagcgataccgatatcagttacgccgagtcatggatcgggctggaacggtcgctgaaactgatcttgccggagacggatacggccgcggtttattttgaacaaaaaggaccgttagaaaaactgatccataacgtatgtgaagaacttcacagcgagtcgttcggcagtgtcatgtacagtgaggaaatccgccacgtcatggaaatgaagcagacggatatcgcccctgttgagaagcgtgtgataaagagcggaaaaacgtacttgattaccggcggatgcgggggattaggcttgttatttgccggatatttcgctgaaaaaggaccggttacgctcattttgacggggagatcagcggcagccggcccggtgctgaacaagataaagagattggaagaatcaggcgccaaggtgttttacgtgcaggcggatgccgcagatcaggcccagatggagaaaggtttgcaagaagtgaaagagaaaggatgcgggccgattcacggtgtcattcacgctgcaggtcttcaaggcactgaaagcattctggagaaagatctgcaaacctttcagcaagtcttatcgccaaaagcggacggcaccgcggtgttagatcaggttctgtcacgggagccgcttgacttcttctgttgtttctcttcttcttcagcgattttaggagacttcggttcttgtgactacgcgatggggaaccgcttccaaatggcttttgtccgtcatcgggataaacttgtgagcctcggactcagaagcggcaagtcacttgcaatcaattggccgctttggaaagaaggggggatgcatgtcggcacggcggaaagcaccgatatgtatttaaaatcaagcggacagcgttatttatacactgaggaaggactcgaagcttttgaaacattgttagtccagccgtccagccagtatctcgtcctggccggttttccgtcgagggccaaacgcttcctgcagatagatcaaggcgaacggccgatttcgggttctgtaaacaggaacgtcccgttttcaggaaggcggagtgaaatgaaaggctttacactggaagaatgcgtaagctgggatgtgaaagaactggcggcggggcttttgaaaatagacaagaacagactgacggacgctgacaatctggctgatttcggctttgattctatcagtttggcggaattcgcctcttctttgtccgcccattacggaattgaagtgacaccggccctgtttttcggacattccacactggagaaggtcgtccgctattttctgacggaacacaagtccgtcatggagcatgtctatgaagaaaagaaacctgaatccgcagatcaatctgtctttgaaaaggcaggaacggaaaagcgaaagaagcagaggggaagaaataagctgaacgccggaaccgagggcagtcaggcagctgattccattgccattatcggcatgagcggccgatttcctcaggcgcgcacggcggacgagctgtgggacattctgtttcaggaaaaggatgttgtcgcaccggtcgcaaaaaaaggcttcacaagttcaaaatggaaactcggcgctgtaccgggggcggacgaattcgaccctttattttttgaaatatcgccgagggaagctgaaacgatggatccgaaacagcggctgcttcttcaggaagcgtggagggcccttgaggacgccggctacggcgccagtcacatcaggcagcagacgatcggtatgtttgtgggggcggaagaaggagattatcaccttttaacacgggacaaaggcaatgtcacgtctcatcataacggtattttggcggcacggctggcttatcacttgaatttatcaggtcctgtgatggcgataaatacagcatgttcttcggggctcgtttctgtccatcaggcggtattaagcctgcagaataaagagtgcacaacagctgttgcggccggggtgaatatcatgaataccccggacttttttgaaacgatagataaagccggaatgctgtcggaaaacgggaaatgcttcgcgtttgataaaagggctgacggcatggttccgggggaagcggccgcggcggttgttctgaagccgctgagagaggcggaaaaagatggtgatccgatttacggggtgattcgggcgagcggcatcaattatgatgggaaaacaaacggaattaccgctccgagcggcgtcgcgcagacccggctgcttacttctgtttatgaccggggccgtatcaaccctgaagatatcgaatatatcgtcacacacggcacaggtacaaaactcggtgatccggtggaaattaacgcgctttatgacgcattttctgcctatacaaacgaagaagctttttgcgcgctcacatcaattaaaaccaatatcggccacacgtttgccgcatcaggcattgtcagtttaatcagtcttttacaggcgttctcccgtgagatgattcccgccagtctgcattgcagcggggaaaaccgctatatcaactgggagaagagtcctttttatgtgaataaaacgggtagaccgtggccttctctgccgggtaaaaaccgaatgggggcagtcagcgcattcgggatgagcggaacaaacgcccatgtcgttatggaaagctataagcgcagcgcttcacctcatcgtgatgcccctgcatatttacttactttgtctgcaaaaacagaggaggcccttcaggaaaaaatcgaagatatgatcacttgggcggaaaatggcggactgaaagaaaatgatctggcccagctcagctatacgttgttaaaaggacggcatcactttaaccatcgcgccgccatcgtggtgcaagatgctgatgacgcagtgtatgtatggaagcaggcaaagcttaatgaacatcatccttatgtgttttcgagaaaagtaccgcagcactttgcagggcgtcagcatattcaggagcacataatagaagtgctcggcaagtgcagcgcctcatattctgaccatagaaaatatcaggagctgttatgcgtgctggcagatttttattgtcaaggttatgaaatcgaaggggacttgctttatggcggacctttgccgcgaatcggcaatctgccgggctacccgtttgccaggcagacgtattgggcgtccgatcgtcttcagggagagcttgaaagccggaattcagacgaacgtgaaaagcttcacccgctgctccatgcgaatacatcgaccttgaccgcccagcgctttacttctgttttttcagggcatgaaccgttttttaccgatcacatcgtcaatggaaaaccggtgcttccgggcgcggctgctttagaaatggcccgggccgccgttacgctggctgctgaagacttgcccggcgggaaaacgggtgtaaggctcaaacagatcgtttggctccgtccggtgacggcgctttctgaaggagtgacgcttcatgtaaagcttcagccgggagaaaacggagacatcgcttttgaagcgtatgccgaaggagaagagccgcttgtctttttccagggaaaggccgtgctcgaagagacggagtgtgctcctgttctcgatgtggaagcggttcaggcgcgctgcagcggccgtcacttgtcaaaggctgagtgctatgaagcgttcgacagcctcggcatcacctacggaccgtcgcatcaggcgcttgacgccgtctatgccggaagcggagaagttctcgcgaagctcactcttccgccgtccgcccgcgaggaaaaggatccgttcatcctgcatccgagcatgctggacgccgcccttcaggcttctatcggtctcgtgctctcagacggttccgcgtccggacggccgtttctgccgtttgccctgcaggatatgcaggtgttttctgcgtgccgggagacgatgtgggcggtgctttcctcagcggacggcgcctatcatattgagctgtgtgatgaaaacggcgcggtatgtgtccgattgacggggctcaccgcccgttttctggaagaggaaacggaggaaaaaccgctcttgcttcagccaaagtggcaggaatcaccgccagatgaaggcggcggacaagaagagtctttcagatacgtgacgctgtatggcggaatgaacgctgaggacataagcggcggcgccgtatgtgcggctgacggcgaaggtccgattgaagaccgttatgacgcctgcgcggcggagctgtcagcgatcgtcacgcgtcttatcaaagaaaaacagaagaaaaaaacgctgatccagcttcttgtccccgacaggggggaagacaatgtattggcggggctggccgcttttctgaaaacggctcaccttgaacatccgaagctgtacggccaagtcatccaagccgatccggacgagtcagcctcggcgcttcttgccaagctgaaagaaaaccgggcgcatcctgaacaagcggaaatccgttatgaagacggcaaacgtctcgtcagaaactggcgtcatctgccggcgcctcaaagcggcgccattccgtggaaagacgaaggggtctacctcctcaccgggggagcgggcggcatcggactgattgtcgctgaagaaatagcctcccgcgtcaaaaacgccgtcctcgtattaacgggaagggcggaagcgcttgataaagaccgctccgcccgcttacggcgcttggaagcgtcgggtgcccgcgtattgtatcaaccggttgacgtgacagacagggcggcggtcatcgccctcgtccgcggcatacaggaggagcacggaacactcgacgggatcattcacggcgccggcgtgatcgctgacaactacattctgaaccagacagaaaacgaacggaagaccgtcatggcgccgaaggtgaaagggcttatcaatcttgatgaagcagcgaaagatgtgcggctggactttttcatcctgttttcttccttggcgggaggtatgggaaatccggggcaggccggttatgcggcagccaacgcatttatggatgtttatgcagcccgccggaaccgtctcgtgcgggacaacgagcggagcgggcagaccctctccgtcaactggccgctttgggaagaaggaggtatgcgcgtggacaaagagaccgaacggctgatgtatgaacagaccggaatgaaagccatgcgatcggcctcaggcatccaagcgctgtacgccgcttttgcctccggagaacaccaggtcatggtggcagaaggcgacgaaaaacggattcgcagccatattttcgatctgggcgaaaaacaaagcgccgccggacaagctccggcagtggcagatgcaagagatctgaaagatcaggttcaagagaaactaaagcggcatgtatcagatctcttaaaggtaagcatgaaagatattgaggctgacagcgaactgacggaatacggatttgattcgatcattttcactgaatttacaaatctattaaatcggtcttatcagcttgagctcagcccgactatcttctttgaatttccgacattgcgcaaactgagcggccatttgatatctgaatggaaagaagcattcagcggcttagaaagagagagtttaaaaaccgctccaaaagccggaataagaaaagctgaagctccggcggccgttcatgtcaagcgggaaacgcccgtatccgtaaaaggaaaatcagaagaaaaaaccgaaccgatagccattatcggaatcagcggtatttttccgcaggcgaaagacatagatgaattctggacacgtttacaaaaaggagagcattgcatcacagaaattccccgagatcgctgggattggcgcgaatattacggcgatccggcagcggatgcaaataaaacgtcaattaaatggggcggtttcatagatggaatcgccgggtttgacccgctgtttttcgggatatctccgaaagaagctgaaatgatggatcctcagcagcgtctattaatgatgtatgtgtggaaagccattgaagacgcggggtactcagcaaaacggattgccggaacaaaaaccggtattttcaccggcacattgggaagcggatatcaaactttaatcaacaaggcgggtcttcctgtcgaggggtatacgatgaccggaatcgtgccgtccgtcgggccgaaccggatgagttattttcttgatatccacgggccgagcgagccggtagaaaccgcttgttcaagctctttagtcgccattcaccgcgcggtaaaagccattgaaacgggagattgtgatatggcggtcgcagggggcgtcaacacgatcgtcacgcctgaagggcatatcggttttcaaaaagcaggcatgctcagtgaagacgggcgctgcaaaacattttccgatcaggctgacggttatgtcagaggagagggtgccggcatgattgtcttgaaaaagctttcagaggctgagcgtgacagggatcacatctacggcctcatccgcggtacagcggaaaatcacggcggacgctcagcgtcacttaccgcgccgaatccgcaggctcagacggatgtgctgaaaagcgcttatcaaaaagccggtattcacccgtcaacgatcacttatatagaagcgcacggaaccggaacggcactcggagatccgattgagatcaatgcattgaaaaaagctttccaaacagacggggcgccgggcggatattgcgggataggctcagtcaagacaaatatcggacatttggagctcgcagcaggtattgcgggcgttatcaaagtattgatgcagctgaaacatcggacgctcgccaaaagtctgcattgcgagaacatcaatccccatatcaaattgaaggacagtccgttttacattgtgacagaaacaaaggagtgggaagcgctgcgtgatgaaaacggccgggtcctgccccgccgggcgggtgtaagctcattcggtttcggaggtgtcaatgcgcatatcgttattgaagaatacatgggcagaagtgagacggaacagcaggaaacccgtgagaaagcgtcatctctttttgttttgtcggctaaaaatgaagagcggctgaaggaaagagcgcgtctccttcgagattttatccaaaacggatcatcccgccatatcgatcttgcagatgccgcatacacactgcagaccggacgggatgcgatggaagcgaggctgggaatcattgcaggctccgcagaggaactgactgaaaaactgaacgcgtttctgttgggaaaaaacagcgaagatatcatcagcggccgtaaaaaacgcgagaataacacgatttccatgttctcagacgatgaagacgcggctgacctcgtcagcgcctggcttgagaaaaagaaatacaggaaagtgctgcggctctgggcaaacggatttgacacagattgggagcagctgtatacggacaggaaaccgcgccgcatcagcctgccctcctatccgttcagagccgaccgctattgggtgccgaaacgggagcagctgccgctttcgaatcaaaaaacagtattattgcaaaaaacatgggaaccgtgcgaggcagtgtcttcatccgagccgttcaacaacaaaatagcgctcatcgtctctgaagatacaaaagaccttgccgccgaggtgaaaaaacagctgaatgatgctgacattgtgcaggaaaatcagctcatctctttcttacaggatccgaacgcggccatctattccgggtttattgacttcaccggctgcggctcccgacaaaagcggcaggacatcagctgggtggcatcgctgcagcagctgattgaatacggccgcggacaagaaaacatgaaaatgctttatcttacaaaagggcttgaagccttcaaaaataaggctgccgtcatgcatggtattgaaaaagcggggctttatcgcatgctgcggcatgaatacagccatattctcacctgtcacgccgatattgatcctgaagggccgctggagcagacagccgcttttattaaacaagaaattgaatcagacttaacggagtctgctgtttgctgcagggacggcatgcgcttcagctatgttcttcggcagactgatcagattgaaccagaagccgtgcaaacagaccggactgcgtttccaaatgacgccgtcctgatgataaccggaggaacgcgcggactcggcgctttatgcgccaagcatttcgtttccgcatacggtgtgaagaaactgcttctgacaggcagaaaggagctgccgccgaaaaccgagtgggatcttgagcaaacagaccctgtcgtttcggaaaaaatacagcttatccggcagctggaatcacaaggcgtaaaagtgtgcgtctcagcagttgatctgacggataagcaggccgtcggacggcttataaaagaggtaacctcaacgctcggacctgtcggaggcattctgcattgcgcgggaattgcggaccgtgaaaaccctgcttttctccgtaaatccaaagacagtattgcgcgggtgctcgcgccgaaagcagacggccttcacagtctgtatgagagtgtaaaggatgatacgccggcatttttcgttctgttttcatctgtctcggcatccgtcccgattcttgcggcgggtcagagcgattatgcgatggctaattcttatatggactattttgcagaaaacaatgagagcggcatcattagcatacaatggccggcatgggatgagacgggcatgagcagggatataaaaagcgggatttatgagcaaacgggattgctgcggcactctgacgctgaaggtctcaagatgcttgattacattttaagagaaagacccggagctgtcgtgctgccggcacaagtgaaacatgattgggacgccaaagcgctggaaaatgccaagccagccgcccataaaggaatgagaacagcttccaaacctcctgaaacaaaaaaacgggaacataaccggattgatattcaatcttggctgaggtcgcttttggcaaaagagctgagtatcgatgaaacgcatatggatatcgatgtgccttttcaggaatacggaatggattctatctttctggcgcaagtgctgacaaagatcgatcaaaaactgccgtccgtttcaattgatccgactgtccttctggaacaccctaccatagaacagctcgcggattatttagccgtacattgtccggaagctttttcggcagatgcaacagttcccgcggagaaggtccctttgcagaagacgccgaaacggagcaaaaaaacggcagataaccccgggaaacggggaaaggttgcgatcatcggcatggcctgtcattttccgaaagcgggggatataaaagaattttggaagaatctccgcagcggaacggatgccgtcactgaagttccgccggacagatggagtgccggggaacactatcagccgggtgaatatcaagaaggaaaaagcatcagtaaatggggcggttttattcacgatattgatcaatttgacccggagtatttcaatatttcagaaacgctggcaccgatgatagacccgctgcaaaggcagtggctcgaagtgagcgcggaagctttggccgatgccggttatcaaaaagaggatctctggggccgccgtatcggcgtttttgccggtgcaagggcaggtgcgttccatcagaaatttcaatatttgcaaaaagacgcgattattggcgcggggcaaaattttattaccgcacacatggcgcacatttataactttacagggcccaacctggtcgtggatacggcctgctccagttcgcttacggcaattcatttggccgtgcaggctattcaaaatggagaagcggaagcggcctttgcgggcggggttgacattttgcttgatgaaaaaccttttctcacaatgagcgcggcgagaatcttatcgccaaatggccgttcaaaatctttcgatgccgatgcggacggaacaggaatcggagagggctgtggtgtgctggtgctgaagccgcttgaaaaagcgatagaagacgaagataaaatatacggcgttattgacggctctgcgattaataatgacggcagcacaatgggcgtgacgacgccgaatccccgggcgcagcaggacttgattgagcaggcggttcagtcagcggaaatcgatccggacaccatgacatacgtagagacgcacggaaccggtacattgatcggcgacccgattgaattaaagggattaaccaatgtcttgtctgcttattccgatgaaaaacaattttgcggtgtaggaagcgtcaaaagcaatatcggccacttgctgagtgcggcgggcgcggcgggaatcatcaaagttttgctggcgattgccaatgaagaactgccgccgactttgcattgccataaaccgaacccccgcttccaatttaaagattctccgctttatcctgtgcttgagctgaagcggtggaacggaaaaaaagagatactcagggccggggtcagcgcgttcggtttgggcgggaataacgcccatatcattgtcagcaacgaaggaattccgaaagagcgaaaagcggccatggaaccgaaaggcggccagacagtataccgaaaacagcggtattggcctgaaaaagcacagttgtccgaagcggaagaaaatgaggcgggcacagaagcaatgtttgaaataagcgaggtgtgatagattggcagttgccaccgatcaagtcaaaacgttcctgcagaaaatcagccatacgaattatatcgtccgggatcatcgcgttcatcaaatccgcgtcctcccgggcgtgactttaatagatatgctgtatcggctcgccgccgggtatctcggtgaacgccctatagaattaagacagattatttttaagcagcctgttgtaacatctgaagagtttgataaacacctgtatgtgacctttacgccggcgcgtgacagctggaaagttgagattactagcgaaaaagcaaaaaacggcacaccgcttggcggaaaccgggatgagaatatggaatgccagctttatttgcaagaagacacgccgcgggcaaaagaactgaatattgaagcgttcatgaaaaacgcaagccgaaaatgggacatgcatgacatttatggaattgcaagaagaagccatattgagcatggcgagtttatgaaaaatgaaggggccgtttatcagcttcaggataaagaagaattaatggagcttactctgagtgatttggctgaaggattccgggagaaatttaaggcgcatccggcttttttggatgcgtccacccttgccggctcttcctttgcattgtcggcccaaaagcagaatgacacaccttatattccttttatgatcaatcgtttttgcatgtatcagccgtttccgaaaacgatttacacttattctgcgaaaaacagccgcactgaaagcggcgtatcagatagcgaacctgatgtgtattcggccgacttcacgatttacgacagggcagggaacgtattggccgaatgtgagaaactgacagtaaaaagggtcagacaagcgaatatgattacccatctgatagacaaagagaagccgcctcagcagaacagaagcggccgtggtgagtcggaaaattctgtggccgcagaagacgtgtctgaacagcaaacgccggaacaaaacatggtgacttacataaagtcggaaatcgccaggctggtcaatcgtccggcacaggatattgatgtgcggaaaggcttttatgatatggggcttgactcggcgcatttgctgaagcttgtaaagatattagagcagacttttcaacagcagttttatccgacactgctttttgaatattcatctgtccgccgccttgcggattaccttatcaatgaagcgggctgtgtgctgaaagattcggcaaaagaacggcatacatcagacgctgacactgctgatgaggttctgttttttgaacccgcctggaaagatcatccgctggaaacggcggtgcagaacgggcaaaaacacacccgtcatctcattatcgctgccgatgcagggccccgtctcaccggtgaactcggcgcacattgcccggaagcggaagtgatagaactgaaaagggagcatgaggctgcagatgagcagtttggagcagatgccgagcgcatatttcgtatgctcaaacgggaactgacagaccatccgaaagaacatacattgattcagcttgtatgcgccgttgagaatggagcggcattgtcttccgctctcggggctatgctgaaaacggcacatctggaaaatccggctcttcgcactcaggtgatcaccttctgtgacaagaatgagagattgccaagtgagacggcggcaatgataagaacagaagcagactgctctcatgcaggctgcacagatattcggtataaaggaaatatacggcagatcagattgttcgaacgtattgagaaactggacgggcagacacagtctccttggaaacaaaacggcgtatatgtcattacaggaggcctcggcggtcttggatttctgcttgcttgtcaccttgcagaaaaagaaaaggtgaagctcgcactcatcggccgttcgccggaacagtctgagaagatcagcagactgaaagcattgggcgcagaagttctttacgttcaagcggacatcggcagcaaagccgaaacagagcgggcatttgctcagattacagaaaccttcggccggctgacgggtatttttcattgcgccggtgttttaaaagatcaatttatcatccaaaaagacagttctgacttgaagcgggtgttcctgccgaaaatcagcggcctgattcatgcggacgaagcttcacggaatgaaccgcttgagtttttcgccgtattttcctcattctcggcgttggccggaaatgcgggccaaatagattatgccgcagcgaacgcttttatggatgaatatatgaaatatcgcgattgcagagcggaaaaaggcgaacggaccggggcttctatgacgatcaactggccgctttgggaagatggcggcatgcaggttgacagcttgatgaaagagatcatgaatgatacaacaggcaccagcccgctaccggccggggaagggatggctgcacttgaatatatgctgcgtctcggcaagctgcaatccgttattttatacgggaaagagccggctgtaactgaaagcatgggccgattgggtccaaagggagacaagaacggatcttcattatccaacgcagctgtcaagagaagaagccgaaaacaagagagacatacagaagagcacgatattgcggtaatcggattggcgggaagatatccgcaggcgggaagcatcgatgaattttaccaaaatctgcgctcagggaaagactgcatcacaacaatgccgaaagacagatggaaaggttatcctttctcatatgaagcagatcagttctaccgttacggaggatttttagatcgcatagacagctttgatccgctgtttttcaatctgactccgcgccaggctgaaatgatggacccgcaggcgcggctgtttttagagacggcttgggaagcttgtgaagatgccggtttttatcaagacagaacggcgcgcgggccatcttcacaaaaaagaaaacgcgtcggggtattcgcaggtgtgttttggagccattatgagctgttcggcgctgaaatcacacagcggggcacaccgctgtctatgggcgtgacgcctgcctctgttccgaatatcgtgtctcactgcctgaactttacagggccgtcaatggctgttgatacgatgtgctcttcttcgctcacatccatacatttggcatgtgaaagcattaaaaggggggagtgcgaattcgcccttgccggcggtgtgaatgcggtcacacacccgcataaatatgcgtttttggcgaatgccggatttctgtcttcagaaggcgtctgcaaaagcttcgccgacggcggtgacggttatgtgccgggagaaggcgtcggcgcggtgttactgacaaccgttcaagaagcggaaagaatgggctgtccgatatatggcgtcataaaaggctccgctttaaaccatgtcggaaaaacatccggtttgaccgtgcctgatccggcatcacaggcggaagtcattacagattcttttcagggtgccggcattgatccggagacactgagctatattgaagcccacggaacaggcacgtctctgggtgatccgattgaaattgaagggctgagccgcgctttccgcaaatggacaaacaagaagcggttttgcgccatcggctctgccaaatcaaatatcggccatttagaaggagcagccgggatcgccggattaacaaaggtgcttttgcagctgaagcatggagaaatctttccgtcattgcacacggacacgctgaatccccatattccgtttccggacacgccgttttatgtggcggaccggctggaagaatgggaacggccgtcacatcctgaccagccgagaagagcgggtttaagttcttttggcgcaagcgggagcaatgcccattttgtcatagaagaatatctgccgccgcaggctgaaaagaaaccggtgagtatacgggaagacgagcctgttctgtttctgctttcggcaaaaaatgaagaacggctattggaatatgtcaaacggtatgaccgctttttacgggaaaaagaagtcaaccttaaagacctggcctacacgcttcaagctggcagagaagcgatgcctgaacggctggcatttatcgttacatccgtttgcggcctgcaagcgaaactgaaggatgtgcttgaacggaaaacagaaattgaagggtgtttccgcggacatgctcaaaatgatatttcatcaagtggaatggccgagctgctgaaaaacaagcaatattccagattgctcactgagtgggcaaaaggagccgccgttgactggagcctgttatatgaaggagagaaggcgaaacgggtcagccttcctgtatatccgttcgcgaaggagcggtattgggtgcctgtgcctgcggatatccagaaacagacagacgaaccggcggaaaaccaaaagatcattcttcaaaaagactggaagcagcaagatccggcggagtctgaagcattatcaggaacagtaatgatacttgcaactgataagacgagccgattggccgatgctctttttaaaggaaacggccatattgaaacgatctgcttcatccatcaggcaaaagacggcgccgattattacgccgccgcatcggggcgaaacctttacggcagagtgcgggagtctcttcaaaacaaacagatactcggggtcgtcgacataaccgcatatgacgcggaatatgaacggcaggaagagatagaacacggaaagcttgcctttttacagcaggctcttgaatcattccgtcatagcggcgctgtgttcagccaagtgacacaccgcctccagcctttcaaggaaagtaaacctctgatgcaaggggcgaaaacggcggggctgtaccggatgctgggcgctgagtatgccaacattcattcttttacgatagatagcgattgtgcgattgagcatacagaagaattaagcagacagattgagactgaatttttacagccgcgggccaaaagcggcagtgaatgctgctacaggctgaatcgccgttatgtgccgtttctaaagcagggtatgaatgtttcggcggcgcctgagctttcctattcgtctgatgatgtgctgttaataacgggcggatcgcgcggaatcggcgcaattgcggcggagcatgccgtttcacgcggctgcaggaaactggtcatcatgggtcgggagccgcttcctgattcctcagagtgggcagacatgaaaaaggacggcattctcccggaaaaagccgagcggatgcagaggttagccgagcggggcgcggagatccgttattacagcgtttctcttacggatcaaaaggggctccggaacatgacggacggcatccgcggcacgatggggccgattaccggcgtttttcattgtgcgggtgcaatgggagaacaccccgctttttataacaaaaccgaaactgaaatcgaaagcgtttgcacgccgaaagtaacagggcttcgcggtctctttgaagccgttcagaatgagccgctgtcgttttttattttgttctcatccgtttcgagcctgatcccttcgcttgctgcggggcaaagtgactacgcgatggctaattcatttatggactcttttgcaaatcatcaagcaggtaaaggaaacgtgtttgttaaagccgttcaatggcccgtctggaaagaaaccggcatggctgaaggcctgccggaaacacctgcttatcaaaaatcaggactttccaggctgtctgccgaagacggactgaagtttttagattacatcattttaaacggacaaagctgcggaattccttgtgttcccgaagacagtgaggctgattttggtgatcttctgaaggtgaagaaatctgaagctcccatgaaaaaaagcactgccggtgaccaaaaggtgaaggatatgattcgtcaatgggtgcgcaccgttttcagcgaagaactgaaaatgacggatgagcagataaaagatgatatgccgtttgatgaatacgggattgactcaatactctttgcggaattggttcaatcattgcaaaaacggatcagcataaagttaacaccgtccttaatgcttcaatatcaaacgattacagaaatggttgactatttcgcagtgcatcatgaagccgattttgtgacaaaagaaaatggtttcgttcaagacagggacgtagagcctgatttaatcgctgacgctgaagagagaacattcatggagccgaaagcggatactgaagacgatattgccgtcgtcggcatgtcctgccgttttccgggggcgggcggaacggatgctttttgggagctgctgatgaagggaaacaccgccatccggcctgtccccgcaacgcgctggcatgcaacagcaaatgcaaaggattatgcggggtggattgatgatatcgacatgtttgatgcgggctttttcggcatctctgaaaaagacgcggcaattatggacccgcaggcgcggatcatattagaagaagcggttcattccgtttatgatgccgggtacggccaaaaggatttatcgggccggaaagtcggcgtgtacatcggcggcagggcgcagccttcagccggtatggaacatattttgcaggcgcctaacccgattttgggggcggggcaaaactatttggcggccaacatttcacgatttttgaatgtcacagggccgagccttgtcgtggatacagcatgttcttcagggctgatcgggctgtcctttgcaaaagacgcccttttggccggaaggattgacgcggccttagtcggttcggtgagtctgctcttatctccgtccgcgcaccggttattcggagcgcgccatattttaaatgagaacggcgtgtttcatatattcgaccgtgaatcagcgggagaagtgctcggagaaggagcgggggcggtttttatcaaacgattgagcgatgcggtgcgggacggagaccgtatttacggcgtcataaaagccgtctcggtaaacaatgacggccggacgctcggtcccggttcaccgaatataagagcgcagagagacgccattcaaactgcgcttgacatggcggaaaagtcgcccgaagacattggatatatagaagtgaacggaggcggttccccaatcgttgattcggtggaaatcaaggcgctctcagatgtctatcagctgaaccggaaaacgcttctgccctgccggatcggatcggtgaaaccgaatgtggggcatttgcttctgtcttcaggtcttgcgggcttcatccgatgtgtgctgagcgtctatcataagcggattccgcctttcttatcagcgcgtgagccatttgaacattatgactttgaagcgtcgcgtattcattttaatcgtgaacccgttgattggcattcagagaagaaaccccgcgtcgcagctcagagttcatttcctgacggcgggacaaatgctcatatcctcgttgaagaatacagaggtgaaaggcagcgggaacatcaccgggcgcctcagccgccggaattcagaaaaaaacactacccgcttttgggcggctggaacagcacggagaatgaagcggaaaaaacaagtaatgaaaaaacagacattgcggatcttttaaagaaatatgagaaaaaagcagagacaagcactgcacctgcagactcgttttggcaggtgacaacgtgacgtttttaaaaggggacgaaccatgaaaaaaacagtgaatctgcgcctgacggcagaacatcccattatgaaaaaccatcttgttcacggagaatctgtcatgcccggtctggcctatattgatatgctgtatcagctggcaaagcaaagccttgatctttcattccgttccatctgtctgaaacgggtgaccatttatcatcctttatcagtgaaacggtcagagcggcttgatgtgagtgtcatattcagtaaagaaaaggagttctggactgcctcgatttgcggggcggattccgggacggttttcttatcagcggaggtgcatgaaggggttttctcatcagataagcgccttgacgcggaagagaaaaaacaagttgcgcttccatcagtctccttgcatacggtttacgaagacgcgagaagccgcggactgtcgcatgacgggctgatgaagccggagggagagatctatgcaaatgaagaggaatgtttccttgatattcggcagtctgattcatgccaggaaaatctccccggcgctctctttcatcccgcgctgatggacggtgccgccatggcctccggcgtattgcagacagctgcaggcgccggtttgtttttaccgatttattatgattcgtttagtgccgctgaaaccgttacggagcgctgttacgcggtgatttcgaaaaaatccggcatgccttctgaaatggtgaaaatggatattgacttttacaacctcagcggtgcgcatattgcttcactgctcggcctgacagccaaaaaggtgcggacagaccggcagctgataccaggcgttcagcagatggaggaaaccttataccgcattttctcaacatacgtaggccgtcctgtcacaagaaatgatgcgcacaccgtattttttgaattaggccttgaatcgtcacagcttctggccattattaaagacatcgaaggggcgtttgatctgcggctgaatccgactcttttatttgagtgcagcagcatatccgaactgcttgaagacataaaaacaaaaggaacagaagaatcttccggccttgtcgcggatgcagcaccggtctctgaaacgcaatcagtcagtcagacatttactttctatgaacatgaagcattccttcaggatcatctggttttcggcaaaccggcactgatgggtgtagtgtatccgtgtctggtgcttgaagcgtccggagcgtctcattccggcacgtatcccgccgagctgaaagatatccgctttacgggcgggcccgtcacgctggagccgggagaggccgcacagattgacatttcatttgcggcagaaaagaatgccgaacgctttaccgcaagctgcactgtttccggtaaagaaagccggaagacgtgtgccgaaggagaaataagcagaggtatagagacacccgtaaaaaaatcgtatgacgttgaacaaatgaaggcgcatgcacaaaaggtagcaccggatgttatttcccgtctgtacgattcggttgccggcttcacgataggcccgatgctgaaaacggtaacggcgggatacaaaatgagtgagagctcctttttattgcagctggacttatcaggaaaaaaagaaaaaggcgatctgcgtcactttgcatttgacccgcttatattgaattcttgttatatgtcgctcggtgaagaagaattgcagctgaaaaagcggattcacgtcccgctcatgattgagaggctgacgctttacggaccagtcatgtctgataccgcctatgtggtgaatacaatcaaacataaaaaagacgggtttctctcatttgatgccgcagtcctcagtcataccggggaacagctggcggaattgaaaaacgcgtctgtgaaagaagtgcttcagccaaatcggcttgaaaatgcgtcttttgccccgtccgggaatcaaagccgtcagaaaacgaaaggaaaaccgctggatattgccattgtcgggatttccggcaagtatccgcaggccgatgatatcaatgcgttttgggaaaatctcaaacaaggaaaggattgtattaccgaaattccgaaagaccgctggaaatgggaacattacttttccgaggaccggacggcgccgggagcgatctacagcaaatggggcggattcattgacgggatcgccgattttgatcctgagttctttaagatttccccccgtgaagcggaacaccttgatcctcaggaacggctgtttttaatgcatgcgtggatggccatggaggatgcgggatatacgaggatatcacctgaactgggccgtcaggtaggtgtgtatgccggtgtcatgtatcaggaatacccgctattcgcggctgaagcgggagtgaaaggacggcatatcgggctccccggcgggatttcatccattgctaaccgtgtctcctatttttgtgattttcaagggccgagcatttcggtcgatacgatgtgttcgggttcgctgacttcattgtacatggcgtgccgggatctgcgggatcatcggattcgcgcggcgcttgccggcggagtgaatctcaccgttcatcctaacaagtacttcatgctgagccaggggcagttcatctcatctaaaggacactgcgggagtttcggcgccgggggtgacggctatattccgtcagaaggggtcggggtgctgcttcttaaacgtttagaagacgccgtacaagacggagatcggatttacggcgtcattaagggagctgccattaatcacggcggaagagcgagcggttacaccgtaccgaaccccaaggcgcaaagcgaagtcatttctcaagctttacaggaggcgggggtatctccgggccagatcagctatgtggaagcgcacgggacagggacgaaattaggcgatccgattgaaatccgggctttaaccgatgcattcggtgatgttcctgaaacatgtctcatcgggtctgtcaaatcaaatatcggacatggggaatctgcagcgggcatcgccgctgtcacaaaagtgctgctgcagatgaagcacaaacaaatcgccccatctttgcatgcggatgttttaaatccgaatatccaatttgacgaagggccgttttccgtctgccgggaattaacagattggaaacggatttcagcagacggagcagaacagccgctcagggcgggggtcagcagctttggggcgggcggttctaacgcgcatatcattattgaagaatatgaggctcctgtcaaacaagcaatcagcagccaagagccggctgtcattctgctgtctgcgaaaaatggggagcgtctgacagaatacgcggagcgccttcttgcttttcttcaaaagaagcatacggataagccggacttatttgatgtcgcatacactttacaagcggggcgggaagcgatggatgagcggctggctttcattgcggactctcttaaggagctggaggacaagctcagatcgtacttggaaaatgaaaacgcaccgcatctttacagggggcgggcgaagcgaaatcatgagacagtggctgtgtttgaatctgatgaagatttgcaagaagccatggtcaaatggctgaaaaagagaaagtacggtcatttgctgaacatgtgggtgcagggagtcgatgtggactggaacttgttatattcgggacaaaaaccccggagaatcagccttcccgcctatccgtttgcaaaggtcagatgctggattcaagatgaagccgaggcggtttcaaaacggaatgacggcaaaacggtgatccatccgctgcttcatgaaaacacatccgatctgtgggagctgaaattcacctctgtttttaccggacgggaattctttttcactgaccacacagtcaatggggagaaggtgctcccgggagccgccgtgatcgaaatggccagggcggccgttgagcgtgccgcatacgctgtgccggacggacgtaaaggaatgtatttgaaagatctcatatggatgaggcctgtcgttcataaggggacggatgtagaagtccatatcagccttatccttaagggaaatgaagacattgaatttacgatttacagcctatcggaagaacccgggggagaacggattatatacagtaaaggcaccgcggtatcaggagagatagcagcggttccgtcagttcacttagagggctggctgtccggctgcagccaatcggttatgacgtctgatgaggtttatcaggctttccggcatgcgggtatgatatacgggccgagccatcaaggaattgatcagctgatgatcggagagaggggtgctgcagcccggctgtcgctgccggaatcggcagacagtaccgccgatcagtttgtcatccacccgagtcttttggatgccgcgtttcaggcgtcactgggtgccggttcagatactgccggagacactccgatgctgccgttttccctgcggcaggcagaaatatttcagccgactcagaaaacgatgtgggcgcttgtccgcaaacagagcgatcggtcagataacggagcgctgacgctggatattgatttatgtgatgaaaacggcgctgtttgtatgagattgacaggcttctcctgccgggctgtccggcagacaaaccaaaccgaaagcaaacggcaggaagttcagacggcgatgcttgcccctgtttgggacaaaactttcttttctctggaagaaaatcgagcggttgatcaggaacaattgctgatcatcggaaagccgggaaataccataaaggctgcggcaaaaatgtggccccgcgcccatctggcggagacgccggatcattcaagcgagcaaacattacgtgaattgacagccgggtatcaggatatccgccatttcttatggattgcgccggatcgtttcgcacccgcatccgtcagtcaggaaatgcttgatgagcaggagaatggggtgattcaatgtttccgtttcatcaaagcgctgctgtcactcgggtatggaaaccgaaacatcagctttacggcggtgacccggcagacacagtccgtgtatccgggtgatctgccgcagcctgagcatgcaggcgtacacggtttgatcggttcattggcaaaagaatatccgaactgggacatcaggctgattgatgcagaagaaggcagtgattcgtctgagatgaaaaacatctggcgccttcctccagatccggacggaaatgctgccgcgtaccgtaacggagcttggcacaagcaaaaaacagtccgggtgctgacaagttccgctccgcgtatgtcgtacagagaaggcggcgtttatgctgtcatcggcggagcgggcggcatcggagaagcatggagcaaatacatgatcacccgttacaaggcacggatgatatggatcggcaggcggccgaaggatcaggagattcagagcaaaatagacaggctggcgctatcaggccccgcgccgcattatatacaggctgatgctcaagatgccgcagcgcttaaagcggccgtccgttccgtaagagagcaatacggcaatataacgggagtcatccattccgcgataacgcttgccgacaaaagtatagcgaatatggatgaagcttctttcagaaacgcttattcagctaaggtgaatacgagcgtccgaatgatcgaagcttttaaggaagaaccgcttgattttgtgctgtttttctcatccgtaaattctttcacaaaaaatgccgggcaaagcaactatgcggcagggtgtacatttcaagacgcctttgcccgccatatcgcttccttgcttgattgtgaagtgaaagtcatgaattggggatattggggcagtctgggtgttgtatcagacccgtcttacagaaaacggatggaggcgtcagggatcggttctattgaacccgatgaagcaatggaggcgctggaagtcttactatcagaaccgttcagccaagcggcattcatcaaagctgctccgcacggcttagccgcgctgacggatcaagatgcaatatcggttgtatccggcccgaagccttcatttatggaaagcgtcaagcggcaaaatccggatcggaatgaacggcttgagactttaaaacgagaaatggagttgcgcatatgaacagccttctttgcaaactgctcttttaccaattacagtcaatcggttttttcagcgagcctgtcactacacctgcagcatccatgcggagcgccggcgtgatcggcacatacggcagatggctggaagaaagcttgaatctattaaaagaaaacggatatatcgcgtatgacggatacacggtcactcttctcacggatcagcgcccggacggccgcacagtctggaatgagtggaatacccataaacgcctgcttcccaatggggagcttgcgcaagctgaattggccgaggcgacgataaaagcgatgccttccattttaaaaggagaacgtccggctacggatatcgtatttcccgattcatcaatgcggctcgttgaaggtgtttataagcataatcctgtcgcggattattttaatgaagtgttagcagattccgcggccgcttacctgaaagcctatcttacagaacaccccgatgcccgcatcaggctgatagaagtaggggccgggacgggcggaacgagcgccatgctgtttacaaaactgaaaccatttgcaaaacagattgcggaatattgttatacggacgtttctaaagcttttttaatgcatgccgaacaggaatacggacctgatgtgccgtatttgacaacagccttgtttaatgcggaggagccttgcgaatcacaaaatatcaaaacgggtgtttacgatattgtcatcgccgccaatgtgcttcacgccacaaaaaatatcggtttgacactgcgccgtctgaaagcgctcctgaaatacaacgggatgattttgataaacgaaatcagcgatcgttctgtttttacccatttaaccttcgggctgcttgacggctggtggtcctatgaggatgctgagcttcggattccgggaagtcccggcttatatccaaaatcgtgggagcgtgtgctgcattcggaaggatacagagcggtttgtttccctgctgaaacggctcatgatttaggccagcagattatcgcagctgagagtgacggactcgtccggatgcaagggatcagagacggcagaaagccatacgccgccccggccgaagttttccgaaagcccgcacagcctgtttcccgcagccgcgcgccagaggagcatcaagctgttaaggctgatggggaatcggtcgtttcccatgtccgctctgtcatcaaaacaagtattgccgatgtattaaaaatgaaagaagaggatattcaggaagaactgaatttctctgaatacggcattgattccattttggccgtcaatgtgattaacgagattaataagcgattgaatcttacactgcagacaacgattttatttgattactatcatgtgaaactgctgaccggttatatctcggcagaatatgaaaccatcatagcctcatctctggagaccgaaagagcgaaaatccgcccggcgcttcaggaagaacggtctgctgaaaaacctctgcagacggaaagaaaggaaaacggttatcagaaaccgaaacaagaacgtatgccgctttctttcgcaaagtccgatgactcgggaatgttccgggttgtgattgaccgtccgggcggcattgaagatctgacgattgcccgcagtgaagtgcccgagacaaaagatgacgaggttcaaatagccgtccgcgccttttctttaaacttcggagacttgctttgtgtcagagggctgtacccgacgatgccgccttatccgttcactccgggatttgaagcaagcggcgtcgtgatcaagacagggaggcatgtaacatccgtcattccaggtgatgaagtgattgtcggcatgggagaggaatttggatctcaggcgaatctcatcacatgtaaagaacatcaagtctatcataaaccggcccggctgacctttgaagaagcatgcgctcttcccaccgtagcggtgaccatgatagacgccttccggaaagccggacttaaaaaaggcgaaaaaatattaattcagaccgcgacgggaggaacggggctgatcgcggtgcaaatggcccggcatatcggcgcggaaatatatgccacggccggatcacagaaaaaaattgagtatttgcattcgctcggggtccgcaataccatttgctatttagaagaagattttgaaacggaaatcatgcgaatgaccggcggccggggggtggatgttgtcattaataccctggccggtgatgccatgcaaaaaggaatgaattgcctggcgccgggcggaagatatatcgaaattgccatgactgcgctgaaatccgctaaatcagtcgacttgtccgtccttcataacaatcaatcgtttcacagcgtggatttgcggaagctgtcccttcaaaatccggaccaggtcaaggactatcaattggaactgcagcggctggcggaagagggagtcattcagcctgtcatctcaaaaatcttttcctttgaagacataaaagaggcgtatcactgtctggatgaccgcggaaatatcgggaaaatcgtcatcagcgtttctgagccgtatcaaatgacgtaccgccccgaacaaaaggatccggccgatacagtaaaatcagcagctgtgttacatgaaaaagaaccgatcgcgattatcgggatgagcgggcggtttgctgaatcggagaatctccatgagttttgggaacacttagccgccggacgggatctgattaaaaaagcagacagatgggatgtctctgacagccaatgccagtatggcagttttatagaggacattgaatgttttgaccccgttttctttcatatatcgggacgtgaagcgacctatatggaccctcagcagcggctgtttttggaagaatcatggaaagcgcttgaagatgcgggatatgcgggagactcggtaagaggccgggaatgcggcgtgtatgccggctcctgcggcggagattaccaggccatttttaaacagcaggggcccgcgcaggctttttggggcaatcacaattccgtcactccggcaaggatcgcctatcaccttaatttacaagggccggcgatcactgttgatacagcatgttccagttcactgacagccattcatttggcatgtcaggggctctggacgaaagaaacggaaatggcggtggcgggcggggttttcattcaatccactcccgctttttatcagtcgtcaaataaggcgaatatgctgtcaccgaccggacgctgccatacgtttgatcaaagcgcggacgggttcgtgcctggtgaaggcgtgggagcggtggtgctgaaacgtcttagcgacgccgttagtgacggagatcatgtgtacggcgtcataaaaggatctgcaatgaatcaggacggcgctacaaacggaatcaccgctccaagcgcgctttctcaagaacgattggaacgtcatgtctatgatactttccacattgatccggaaaccattcaaatggtggaagctcacggaacgggcactgcactgggcgacccgatcgaattcggcgccttaacgcgcgctttccgccgctatacggataaaaaaggatattgcgccatcggctctgtgaaaaccaatctcggacatgccgctgcggccgcggggatggccggactgtttaaaatcctgctgtcgctgaagcatcggcagattccggcttccctgcattttcaccaagccaatcagcatattcaatttgcggacagcccgttttttgtgaatgaaaagctgatacagtggaaacggaatccggatgcaccgcgcagagccgctatcagttcattcggattcagcggaacaaatgcccatcttgttattgaagaggcgccgcaaaccgtgcgccggtcgccggcaaaaccggcctgcctcattcctttatctgcgcggacggagcgtcagctggaaattcaggcagaacgcctgctggattcactcagcaagaacaaagacagcgatctgggaaatataagttatacgctcctgctcggcagaaagcatttacatcaccggtttgcctgtatcgtaagcagtgcggacgaactgaagcgggtattatcggagtggcttgtaaaaagagagcttccgggtgtgtttgtgtccaatttgaaggatcagaagccggcagaagaagccggaatgaaaacattcggaatggaatgcattgaacagtgccgctcggcggcttcgcccgcgcagtacagagaaagcctggcacatatcgctgaccttttttgcagagggtatgatcttccttttacacggctttttgacggagggcaatattataaaacgccgcttcctgcctacccgtttttaaaagaaaggtattgggcggctgatgtaaatagttctttaccaggccaagccatgaaaaagtctgaaacgcaaaccgttctcccgtcttcgccgcagcctgaacatgaagggctgatttctctgactcctttaactgagatcgaaatgagagcgtttgaaccggagacattgcaaaagccaatcgtgttacagcctttggattgtactgtttctgtccagcagccagaaaaagccgtttccgaagacaatagaacattgcttgaagaattgaggacaagcctggcagatattttatttttgtcaccggaagatattgatgctgatgagcctttcatcgacatgggtcttgactccattatcggggttgaatggatacaaacagtaaataaaacgtaccacactgagattactgccaataaggtgtatgaacacccgacgcttgaagagcttgcggaatatatagcgggacaaataaagaaacccgagtatgctgaagcggaggaaacagcggtacgtccgcaaatcccggaagcagaaactccccttgccggcatctctgacggcactttgcgcaaagagctcaaagaaagccttgcggacatcctgtttctgaagccggaagatattgatgagcatgaggcattcattgagatggggctggattctattatcggtgtggaatgggttcagtccattactaagacctatcaagcgtctattacggcaaatctggtctatgaatatccgacaatcgcaacattagccgggtatctgaccggttctgtccaaaaagacaccgaggaagtacatggggaacatacgaaacaaaacgatatatcagaagagacagatgatcaagaaccgcccgagctgatctgtcttaacccaaatggaaagggaagaccgattttctggtttcattccgcgctgggggcagtggagctgtaccagcctgttgccgaacggaccgggcgtcctttttacggaattcaggcaagagggtggatgacagaccgggaaccgatccgcggcattaaaaaaatggccgaatattacgttaagctcatacgtaccgtgcagccccggggtccttacgatgtaggcggctattcattagggggcatgctcgcttatgaagtcacccggcaattgcagctggctggagaaaccgttgagtcaatcgtcatgctcgactcctttgacgcggcgggtgcgcgggaaataaacattcctgatgaattatttgataaaaatatgatgctgcagacggtgaacatggctttatttgcaccgatttatcaacatccggaacgcatttctgaaaccttgattcaccgtgatgaactagatgccgatcttcatgaagacatatttttagagcaattaatcgcaaaagccaaacagcgggggttaacgaagacggacgcgttggtgaaaaatctgatcaggcagaatataaatgttcaggacgcttacgaaatcactgattacgaactcctgccgcttccggatccgaacggggtgacatgctattatttccgaaataaaaacggtattttcttgggtgagcttgatccgtattttacaatcagggctgatattttatccgctgatttcgtcaactattggagccagtgggaagagcatatgacaaacatcgccatcatggatgtggcggtatccaatcatatgacgttattggctgaagacagcgcagccgaaacgatttctgaattttgcggcgttttatattcggcagacggaatgacagaatacagctttctgcagctgcaggaaaagatactgaacgtgcatggtgagatgctgaagcagcccgccaaaacaagaccgtaaattcacatatccgcccgccgggtttactcgtaagctttggcgggtcatttcaaatcttgaacacatcttggaggaatgaaaatgaccagtttaacaaaaatcagacagcagcagccgtacaagtggtaccaaacgatgagagaaacctctcccgttcattacaatgaaaaggaagattgctgggaaatcttcacctatgatgaagtgaagcgggtgatttctgactacagtcatttttcttccgatcataaatacttaagtgcggacaaacaggaaaaaatgatccggcatattaacaaagacagccttttgaaaatggacccgcccgaacacaccgtcttcagaaaattggtcaatcagccgttcatgccgaaatcggttgagtctcttgcaccgcgtatagccgctatcgctgatgacctgcttcaggccgtccgttcaaaagacaggatggacattattgaagattacgcatttccgcttccgattatcgtgatcgcagagcttttaggatttcctccgaaagacagggatatctttaaaagctgggtcgaccaaagccagaatgtaaaagatgaaaagaaaatgaatgaagtgcaaaagcagatgatcggatacttcatgcagtttattttacagcggagaaaacagccgcaaaatgatttaatcagccatttaatttcagctgatttagacggagagccgctgtcagacaagcaattaatcggtttttgcggcttgttgatcgtcgcggggcacgtaacgacggagaatgtgatcggaaattcatttctcagtctcaaggagtttccgcatattctgccccggctgcttgaaaataaggcgctccttcctgactttattgaggaagtcatccgcctcagaccttccattcagcgggtaacccgctacaccgcggttgagagcgagattggcggaaaaacgattccggccggagaaaaagtgtatgcgtggattggatcggcgaacagagatgaaaagaagtttgaaaatcccgatcagattgacttgggacgaaagccgaatcagcatctgtcattcggtcagggcagccattattgcttaggagcgccgctggcccggcttgaagcgaaaatcgcgctttcccacttttttgaacagatgcccgcatggcgttttactgaggatcaagagccgaatctggttccgagccctgtatttcacggcgttgacaggctgcttgttgagttttgagcgaaaaaataaaagaggcttcgcgggaagcctctttactctgggggcttggagaaatgaatgtaggaatcgaagcaatgaacgtgtttggcggaaccgcgtatgtagacgtcatggagcttgcggaacatcggaacttggataaaaaaaggtttgagaacctgctgatgaaagaaaaagtggtggcgcttccgtttgaagatccgattacgttcgccgtaaatgccgcaaaaccaattatcgactctctgtcagaagaggaacggaatcaggttgaaatggtcatcacctgtacggaatccgggattgattttggcaaatccatcagtacatacgtccatgattatttgcagctgaagcggaattgccggttatttgaggtgaaacaggcttgctattctttaacggccgggtttcaaatgggcgtgaatttcatcttatcgcaaacatcgccgggagcgaaagcgctcatcatcggaacggatatttcccgctttttagtggctgaaggcggtgacgcgttgacggaggaatggtcctatgccgaaccgagtgcgggggcgggagctgtggcgcttttagtcagcagcacccctcatgtctttttgcttgatcaaggcgcaagcgggtattacgggtatgaagtcatggatacctgccgcccgattccggatagtgaagcgggggatgctgatctgtcgctcatgtcttatttggactgctgtgaaaaatcatttcaggaataccgaaagcgtgtgagcggggcggattataagaatacatttcaatacctttcttttcatactccgtttggcggaatggtaaaaggagcgcatcggacgatgatgagaaaattggcaaaggctaagccgcaagacattgaagcggattttcagcaacgcgtgctgcctgggattcaatactgtcagcgcgtcggcaacatcatgggggccaccgtatttttatctcttgccagcacgattgataacggctcttttgaaacgccgaaacgcgtcggctgtttttcatacggttcgggctgctgctctgaattttacagcggtgtcgttatgccgcaaagccgtacgcggcagaatcaatttcagatcagccggcatttggatgaacgcgtccgtttatcgatggctgattatgaccggctgctccaagacagcggcatcgtaaaattcggcacaagaaatgccgcgcccgcagcagacatcccgaatgcgcatcaaggaaaaacgcgattggtgctgactgaaataaaagagtttcacagaaagtatgaatggacgacttaatatcagaaacactcagagccggaaaggcttgagtatttttaaagaaacggagaataaacatgaatccaatgattgatgtacaggaaacagaaccgggcattgtgcaggtcacaatgcaggatacggccgggaaaaacgggctgtcagaagagtttgtcagagagctgcaccgggtattccgagacatcaatgcccatccgtcctataaaaccgtccttctgacgggttacggaaattatttctgcacgggaggaacgcaggaggggcttttgaccattcagagcggaaagcttcaatttacagatttaaagcttcacagtcttttattggattgcaggattcccgtgatttccgtcatgcaggggcatgcgatcggagccggctttacgatcggtctgagcgcggatttcgtgattttaagcagagagagtttttattcttgtaattatatgaagtacggatttacaccgggaatgggcgcgacgtatattgtgcctgaaaaactgggaattgtcctcggggaagaaatgctgtttactgccgcgaatttcagcggcgccgctctggaaaaacggggagttccgtttgaagtgctgccgaaaaaagatgtccttcaaagaggccgcgaattggcccggctgctggcggataaaccgagagcctcactggttgcgctgaaaaccaatgtgaccgcacggatcaaaagagagctgacaaaagcggttgaggaagaggtgaacatgcacgaagccacattccatcttcctgaagtaaaagagagaatcagccgcttatacggcagttaaacagaatgaaaaaagcatgggaagccccatgctttatcactggtccgtcttttgcagaacggagcctgcgaattgttctttaatttcggcgctccgggctgcggtttctgcgatgcagtgcatgatggcttcttcaaagcggcgctcttctaatgcgcgaaggcctgcttcagtcgtgccgcccgggcttgtgatttccttgcgcaggcgttcaggccgtttgctgcttgttctgagcatttccgtcgccccggccatggtttgtaaaatcagctcttttgccgtttcttccggcaggccggcttgaagggcggccttttccattgcttcgacataccggtacacataggcgggaccgcttccggcaatggcagtgacggcatcaaggtgtttttcttcaaagcgcgtcgcttctccgatggtttccagaagctcttttgccatccggatttcagcttcactcgcctcggagcttgcggaaaaaccggtcgccgattgctgaatggccgcggatgtattcggcatcgcccggatgatggtgagctttctgccgaaatattgctgaatcgtgtgaatcgtcagccctgcgatgacagaaatcacaagctgatctttcacgtattcgcgaatgttctcaatgctttctgccgcatctttcggtttaaaggcgagaacgagaatgtcggtattgctgaaaaactcttctttatcccggcacggttttactccgtacgttttttggagctcttcaagccggctgtcatttgaccggtttgtcatatatatatgtccgggggctgtcattccgctttgcagcagtccgttcaccattgcttccgccattgatccggccccgataaaaccgattttcttcatataaatcctccttcttctcaaaacacaaaaaaaccttcccgtcaaaaaggacgaaaaggtttcgcggtaccaccttacattagcacgaatcagccgtgctcagctcaaatcccgtaacgaggggatacgtttaggttttcctaaccgctctgagggcaggttctgtaaacaagagggccgcaatgtctttcagccggggacattgctctctgctgccgttgtttatatactagttcctcgtcatcgcgttccgtgttttctagtttgttgttcattatgctatgcgcaagaacgggatgtcaatctttttttccgatatgcggcaataatgacacagtgaaaagaaaacgctaaaatatgattattcaggaatgaaaagaacgaaggagcgtaaacatggcagcgagaaagatcattccgatacgtgtgccgactccgtttgcagtcggcgacgttatcgtttatttagtaaaagatgaagccctaacccttattgattgcggcccgaatacaaaggaagcggctgaatcgctctcattgcagcttaaggaacacggggtttctgcggcggatatagaacaggtggtgctcactcatcatcacgcagatcattcaggtctgctgcaccttttttccgacgatgcggaagtgatcgggcatccgctgaatgacaggtacattactcaggatcagtcgtatatcgcccggcaggaggacttttttctgtcgcttatgactgaaatggacgttcccctgacgcctgaagacatacataaaacagttaagctgtcatacttattttctgcaaaccgtccgttaacgaaaacagtgagggaaggcggaaaaattgacgggcttaacggctggacggtgctcgaaatcccgggtcatgccgcttctcacattgcgctctaccatgaaaaaagcggtgaaatgttcagcggcgatctgcttttgtccaacagctccaccaatccgattctggaagctccagaaaaggggggcgtgcgcgcggccccgatgctcgactacttgaactcaatgaagcggctgtatgacgtaaacccgtcctttttatatccgggacacggcgatctgctgacagacgtaaagcctgcttttgacaggcggcttgaaaaacagagaaaccggtcggaatatgtgctgcgcctgttgtcagaggaaacgctgacggctttccaggtatgccggcggctgtttccggctgtgtatgaaaatgaattgtttttaacgatgtcagaaacgatcggccatcttgacgtgctggccgccgaagggaaggctgaatcctttcagtcggggaacactctgaagtttaaagctgtgaaggggtgaaggaaatgggcagattaacggataagcggatttggatcaccggagcatccggcggactcggagaacggcttgcatattcctgcgcggcagaaggggctcatgtttttttatccgccaggcgggaggaccgcttgcaggaagtgaaaaagacgattaccgcgcgcggcggacagtgtgatgtcgttccgtttgacgtccggcatgcagaagaggctgaaaacgtaaggcgtttgatcggtcatgttgacgtattaatcaacaacgccggcttcggcatttttgaaacggccgctgattcatctttggatgatatgaaggcaatgtttgaagtcaacgtcttcggattaatcgcctgtacgaaggcctgtcttcctgtgatgcttcatgcgaaaagcggccatattatcaatatcgcctcacaggccggcaaattggcgacgccgaaatcaagcctttattccgcaacgaagcacgccgtgttagggtattccaatgcgctgcggcttgagctggccggtacgggtgtagccgtgacaacggttaatcccggtccgattaaaacagacttctttacaattgcagataaagagggcggttatgtgaaaagcgtcggcagatggatgcttgatgccgaccatgtggcagagcgcattacatccgtgattctgacggataaacgggaaatgaatcttccgcgatggatgagcctcgggacgaagctgtatcagcttttcccatcgtttacagaaaaactggccggccgcgcattaaagaaaaagtaacaagggggaaaaaggaatgtccgaccgggatatacacaaggcattgatggcagagcctttagtcaggcaaatggcggaggcgcgtgaagtattttggatcaatccgcataaaaccgatgatccagtaaagcatggcgctgaatggaaaaaggagattgccgaagcggaagaaaggctgcgccggtttgcgccttatatcgcgtcggcttttccggagacggaagcggagggaggcctcattgaatctccgcttgtcttgattaatgaaatgaagaagcatctggaacacagcgccgctcaggctttccccgggcgtctgcttttgaaatgcgacgacgaacttccgatttccggttccattaaagcgcgcggcgggatttacgaagtgctgaagcatgccgaagatctcgcggtaaaagcgggaatgctctcagcagacgacgattacagcatattgactgaagaacggtttaccgcttttttctcaaaatactctatagccgtcggctctacgggcaatttaggtctgagtatcggcataatcggcgcgaagctcggcttttgtgtgaccgttcatatgtccagtgacgcaaagcagtggaaaaaggagctgctccgggaaaagggggttcgcgtcatcgaatatgaagcagactacagtctggctgtcaaagaggggcgcatgcaggcgaagcaggacccttattgttattttattgatgatgagcattcccgggatctgtttttggggtatgccgttgcgggaagccgtgtgaaaaagcagctcgaccaaatgaacataaagcctgatgcagatgaaccgcttttcgtttatttgccgtgcggggtcggaggaggcccgggcggcgtcgcgcttgcgctaaagctgatctatggcgagcatgtccatatttttttcggtgagccgacgcattcaccgtgtatgctgttaggactgttttccggcttgcatgacggaatcagcgtgcaggatatcggtcttgataatcaaacggccgccgacggactcgcggtgggaaggccgtccggactggccggccctctgatggagcctataatcagcggctgttataccgccgatgacggcacgcttttttcgctgctttatcaattaagggcggccgagaataagagccttgaaccctctgcactcgccggactggccggggccgtcaaggtcgttcagaccgaagccggaaaccgttatataaaagagcgggggcttgagatggaaaatgccgtgcaccttgtgtggagcaccggcggaagcatggttccggaggaggaaatggaagagtacagccggatcggttcctcatttttgaaaaaaatgggcagacagtgaagcggttttccgttacaatctttgtaagcgtttgtttttttatcggaaagccatacagagagattggtgtgaattgtgaaaagtaaagaattgaacttacatacattgtatacgcagcacagccgcgagtcgtgggccggattcggcggccatctttccattgccgtttcagaggaagaagccaaggcggtagaggggctgaatgactacctgtcggtggaagaagtagaaacgatctacattccgcttgtgcgccttctccatcttcatgtcacgtctgccgcaagacggaatcagcatgtcaatgtgtttctgaagcatccgcattcagcgaaaatcccgtttatcatcggaatcgcgggcagcgtcgccgtcggcaaaagcacgacggcgagaattttgcaaaagcttctttcccgtctgccggacaggccgaaggtgagcctggtgacaaccgacggtttcttgtatccgacggcggaattaaaaaggaaaaaccttctgtccagaaagggattcccggaaagctacgacgtgaaagcgctgcttgagtttctgaacgatataaagtcggggaaagagagagtggaggcgcccgtatattcccatcttacgtatgacagggaagagggcgccgtcgaggttgtcgaaggtgcggatatcgttattatcgaaggaatcaatgtcctgcagtcgccgaccttagaggacgacagggaagatccgcggatttttgtatcggatttctttgatttttcgatctatgtggatgccgaagaaagccggattttcacgtggtatttggagcgtttccgcctcttaagagaaaccgcttttcaggatccggcttcttattttcataaatttaaggatttgtctgatgcagaagcggataccatggccgcctccatttgggagagcgtcaaccgtccgaatctgtatgaaaatatcctgccgacaaaattcagatcggatttgattttgagaaaaggtgatggccataaagttgaagaggtgctggtaaggcgggtgtgatgggaggaggaagcgaatattatgatgcatcatattgagttgtatgtatctgacttgaaagcctccgcccggttttggggatggtttttaggtgagctcggttatagagaatttcaaaattgggactccggcatcagctggaaaaacgcaggattttatgttgtgcttgtacagacagaggagcgttttttaacaccggagtaccacagatgccgggtcgggctgaaccatctggcttttcatgctgcatcaagagagcaggttgacgagatgacagaaaagctgcttgccagaggatgccccgtgctttacagggaccgccatccatatgcaggcggaagcacgcattacgccgtatacacggaggacccggatcggataaaagtggagctcgttgcgcctgcttctgaatgaactataacttttcgtttttttcttcgcgcagcgcgtcgagtttcttttcgattctgtccaattgtatgcggcgcttgttcaagcttctgaatacgtatatcacggcaaacaggaaaaatgcggctgcaataaatgaaatcaattgaaaaatgacatcaccgatgttcatcttttttacctccgtgtgcggcgggtttcttcagcccgccgttttttcattttgaccgatgtgaagacatgggggatgaatcatttctctcctagctttgttttttttctgagaatgaatagtttctgcatgtggcttatgaccacttttgcggccgcatatcccggaatggccagaagcatcccggcaattcctgagaatttgccggcggcaagcagaagaaaaataatggtcagcgggtgaatgtccagcttccgtcccataatttgcggggaaatcagctggctttcaagctgctgtacaatgacgacgaccgtaatcaccagcaccgcctcggtcggtgaatcgaacaatccgacaatgactccgggaaatgtgccgatccaaggcccgataaacggaatcaggtttgtcaccatggcgaacgcgcccagaacgagcggataatcgagcccgattataaaatagccgattgtgacgagtacgccgacacaaaaactgacgagcagctgtccttgtatgtatgaactgagagcttcatccatgtcctgaaggatttgttttccttcttttttatgtttttccggaagaagccgcagcagtcgccggggggctttgtttccttcttttaacatgtaatacagcgcaaacggaataatggcggcggtgatggcggcattggcagccgtaccggccaggctgctgagagaatcagcgattgaaccggaataatttgcggctttgtctgctaattttttaaaggaatccccatgctgaagccgggaaaaccatttgctgtcctggagatgcccgatccaattttcagcttttgcggaaagctccggaatatgatctgtgaaggctgtaaactgtttttgaacggcagggcccgccgtataaaggaagaggacaaaaaggccggctgttcccgcataaatcgctaaaatcgcgattccttcgggcagctttaatttcgcatgcagcagtctgacgagcgggcggcacaaatagtaaaggacgcccgataatacaatgggcggaaacaaggttttaaccgtaatcacaacaggctggaacaaaaagtctattaatgttccgagataaatgatgagaaataacagaagaacggcatagccgatcctgaaataaggcccgacaggcatatcctgcaccacgcaatctttaaaggtttactctcggacatttcccttatcgccgggtgcataaacgtccgtgtcaggaaaactgcccttgattggtgacgtaatcgtagataatatcttctacatgggcatggagatcctcatcgggttcttcattccttctttcttctaaagctttttttaaactctgtttttcataggggctcagcggatctgtcgacacattccgtccatactggcggagggcttgtcccagcattttttctataaattgatccatcatatattctcctattcttgtcattcatctttattctactaaatatcatgtgatcctcccactcttctatcatattttctgtcagggccgggttaggatttttattccaattcagctgagagaatacgatgaaacggcagcgttaacgcatcttcatcgtttatgatttttaaacgcttttcgtcatgcctcacttgttttacccagccccaaaagcggcgggggccgtgtgcggaagcgtaggtgaccgaaatggccctgtcttcttcaatcgacgccgcaatgatgcggttcatgtcgttcagttgctcttcgctcagttccggaggccggaattcccgttcttttcgttttttcgcaagcagctgctcccgatgttcgggcagcatcatccggcttgattcccacatgacattatacccgggtgttaatttgttcggattcatgtatatcacctcaaattatttgtaatgcccgccgattttttcagcccggtgaaaggcttggccggcctctgtcagtgaagcggcatggaggagcgacgcagggccgtaccgctcatgaatatcatccaatactttgccgagactgatctttttttcctgggcatcgaacaggctcagctgaacataatcacaaggctccagctgggaaagggagacgccggcgctgcggacgggcgcaccgttccaatgctctttgaagagcttgaccgccgttttaaaaatatccattccgaaattagtcggtgacaccagctttctctgtctgtgaaaacctgaagggaattcaaaatcagcgcctctgatgctgaccgaaaccgtatggccgatgtattgtttgaaacgggcgcggcgggccacttcttcgcttaactccagcagcacgactttgatatcctcaaagcggctgtagtctctcgggagggtcatgttatggccgatcgctttttgccggctgtgcgtgttgacggtgaccggagagggatcgatgccgcgggctgtccgctgaagcaattcgccgttaatgccccagcgttttttcagcaattcggcggggtgtccggcaagcccgccgattgtgctgatgcccatccgtcttaaatgatgctccatccgttttccgatgccgaataattttccgaccggcagcggccacagatcctgcctgatatttgacatatccaatctgtggatgccggatgcgttttttttggcaaaatggtcgcaagccatttttgcgagcgccttattcggcccgatgccgacacgggcataaatgccgaattcacgcataatcgcttgctgaatgcttttggcaattgtaaaaggatcaccgaacagccgcctgcttccggtcacgtcgagaaactgctcatcgatggagtagggttctacaagatcggtataccgttcaaacagttcggtaatcatgacggatacatcaatataccgctgcatccgcggacggacaataacggcgtcgggacatttggcctgcgcttcccacagccgttcggcattttttacgccgtatcgtttggcgagcggacaagccgcaagcacgacgccgctgcgtctttcgggatctcccgagacaatcacgggccggcttttgagatgaggcgcttccgctttttccacagacgcataaaacgattgcatatctacaagaagaatatcagccataaaaaaacctccgggaacatttgttctgtttttcattgtacccgaacaatgatcacgtttatactggtaaatcattccccggctggaagacgtgctgattcgttcgcttgaaaagaaatcatttacaattgcaaacaacccacatataattttttatattccaatgagaagagctgacattcattttgccggacgaaaaggagagtcaatcgataatggatattcgaacaattacctctgaagactatgaaatggttacgtctgttttgaatgattggtggggcggcaggcagatgaaagacaaactgccgcgcttgttttttgaacattttcaggacacaagctttatcacgtacgggccggagggaatgaccggttttttaatcggttttcagtcacaatcagaccctgagacagcctacattcatttttccggtgtgcatccggatttcagaaaaatgcaaattggaaaacagctctacgatcgatttatggagacggtgaaaaaaaggggctgcacaaaagtcaattgcgtgacggcacctgtcaataaagtatcaatcgcttatcatacaaaattaggctttgaagctgaaaaaggaaccaaaaccgtaaacggaatccctgtttttgcgaattatgacggtccgggagaagaccggattctgtttgtgaaatatatgtagagggggatgaatatgggttttttagctgacacgcccaaaccgccttattatgcggtcattttttcatcaataaagggaaaatatgatgaggaatatgaacatacggcagagcgcatgatgaatttggcaggcggacagccaggctttttaggcgcggaaagcgttcgggaggaagacggctgcggcatcacggtttcctactgggacagcctggaggcgattaaaaggtggaaagatcatactgaccaccaggcggcaaaacaaaaaggaaaaagcgcctggtatgaagcgtacgcggtccgcattacgaagacggagtcacagcggatgtttgcgtcaaaaggggcggaagattgattacatttttacagcatacacaagaacagaccgcgcgggaaattgcggcggttcagcgctgcgcttatcaaaaagaagccgagctgatcggctttttcggcattcccgccttgcatgaaacacccgatgatatacagcggtcacgggagacgtttgccggttacaaggaaaaagatcagcttgcaggcgtcatttcgtatgaaaaaaagggatatgaccttgtcatatgcaggctgacggtgcacccgtccggctttcgaaaaggaatcggacgggcgcttattcaatttgtgatagatcaaaaccgggacgcccaaaaaatagaggcggctaccgccagccaaaacgttccggcagtctctctctatttaaaaacaggtttcacagaagccggacagatagagacgccggaagggctgaccctctcgttttttcatctttatccgaagaggaaagcggaagttgttccgtacaagccggaatggaaagaaatatttgaaagagagaagacggacttgatccgaatcttcggcccagcacttcattctgtcagccacatcggcagcacctctatcccggggatggcagccaaacccgtcatcgatatactggcggaggttaaagatatttcggacgctgaccgattcagtccgcagctggaagcactcggctatgaggcgaaaggggaaaacgggatagagggccggcgtttctttcaaaaaggcggcaacaagcgcacacaccacgttcacatatacgaaacaggccatccggacgtgaagcgtcatctgctgttccgggattacctcaccgcaaagcctgaaaaagcggctcaatacatggaactgaaacggcacctcgctaagacgtacccatacgatatggcaaagtatagtgaagggaaaaatgactggatcaaggcggctgaacaagaggcaaaggtctgggagagcgggctgctgtaaagaaagcagaaacaatgcatacagcggctcggtatgctacaatggcgaaaatgaaaaacggaggatcatctatgcaaatacatgtgacggatgcggcgaaacacacacttcagcaggcaatggacgccaacccggggaaaaaagcgcagctccgctatgacgcagaaggctgcgggtgcgcggtgagcggcgtgccgaccatctggctggcggacgaattaacgggacaatgcgaagccattgaaaccaacggacttccgctttacatccagacctcacaaaaagtgttttttgacgaggaaatgacaatcgattacaatgaaaaggcaaaaacgctcgtcttaaaaagcccggcagagatgctgagcccgagaatgagcatattagtaaagcagggagaaacggaaagtgaatcaaaagctgaaagccattaaacagacggcacagcataaaacgtgggtatcctttctgaacaacaaccacccgtacagtctgctgcactggtccatcggaggcgctgaatccgttcagaaggatgtctggctgcttcaggatgagatgaccttcaaagcgcaggagtttacgacaatcgacctcgccattgattggatcggagaaaatatggacgggattaccgacgttttatgacgtgaaagcgaaagaaccagcatacgttctttcgcttttttacgtttgcgtcatggtatctaaaaaggtttgaacggctttacggtagctctccggatttttggtgtacgacatggcatgcccgcccgattcggccagatagagcatcttagggccgcgttttctgcggtgcagcaattcggaagaagcgggaggtatataatcatcttccttactgtgaataaacagcacgggctgccggattcggctgataaccgataaaggcgatacatcacggatacggtatccttctctcatccgcaaaaagaaatcagccaaaggcagaagcggccacggaggcagccggaactcccgcttcagcctgtaggcgagctgatcgcgaaagcttgcgaacggacagtccgcaatataaaaatcagcgccgttttcaatcctgatgcccgcccgcgtataataaggccgtcaccgctcccatcgattccccgtggatgccgatttgaccgccgtctccggttttgtgtctcacccaattcacggcttcttccaaatcatctttttcaaaatagccgtagctcgtcgttctgccgccgctttttccgtgcccgcggtggtcatatacgagcacattccatcctaaatctaaaaataaatccatgtatttcaatgaattgaacgaatttacggtaacgccgtgacaaataatcatggtgtttgccgtatgatgcggggcgacgtaaaagcctttgatctcatacccgtggcgtgacaggatgacagcctcttctttttccatggcctgaaaggaatcaaatctatcatgcccgtccgccgtttcttttttcatgatatcttcatccgtctttttcttcataaacataatcagattcgtaaaagcgaatccggcagccaaaaagactgcgcaagccgaaccgaacaccgccagccgttttttcacacaggcaccctcctttcatatgaaaaatccttcctccggcttttcaggaccgtgaacgttgccggcctccggcgctccgtggtacacttgcttcaccatattcagatacggggggcgtcatgatgaaaaagcagctgcctaaagaaaaacacagcttaaaagacgatctggaggaagatctgaaggccaggcttttgcaaatgaaaagtgagctgaaggaagaagacgagaaaaaacaggcgcagcaaaaggcggaacaaatcagaaaacgaaaagaaaaagaaaaacataaaagctttgaagagctgctgaatgaaagcagtctcgattggcacaaatataaataaaccggcatctgaaaaggtgccggttttatgatttaagaacgatgggattcgtatacgtcccgttttgtatggtattgcaaggctttgatttcctggctgcttaaacgccgggcctctgcagccgaacagttttctctcagctgctcaagtgagctggctccggtaatgacagaagcgacggcctgctgtgacagtaagtattgaagagaaagctccgtcatgctcaagtcaggtgcggcagcgctgatcgcttttttggtttcttccagttctgcaaaagaatatgttaaatagccgttctcttttacgcttgcggccgcttgatcaagcggtttttccgtaagaagccctttagcgacaggccctcttgcgactacgctgattccgttctcctctaaaaggggaagccactcctcgggacgccggtccagcaggctgtattgcatcataacgctggtgatatttgattttttcacatattctttaataacattcggacgaatcgaggaaataccgtaataccggatgacaccttcctgttttaagtcctcaaatgcttcgatcgtttcgtcaatatggtcttccatcgtgccgccatgcagctgataaaggtcgatatagtccgttttcagccggcgcaggctgtttttgaccgcttcttttatgtatcctttggaagcgtcccaatgccagccgtctttatcatcattccagcggtttccggctttcgtggctaaaatgatgtcgtgtctgcggtttttgacggcctccccgacaatttcctcatttctgccgaaatcataaagatcagcggtatctaaataattgattccaagctcgatcgcttcatccaaaatagacagcgctttagctttatccgtgcccagcgacatacagccgagcccgatttcgcttatttctaaatcagaatgtcccagtgtgcgttttctcatcgtttcgctcctttttatagtcttttattgaccgtaatataaaggcgcgaagttttcaactgttaaggcccggtgatccaatctccgacatagcggaatgtccgtccgtattctttcagtttagcccgcacttcccacgcctttccgaccaatacgatactcttatccttccggtacaccttcaatcgaaaagcacctccctctcatgcatgtatgataaaatatatgaggcataatagagagacagaacgggagatgacatgatgaaacatttagaagaaaaaacacttgcgaaaaaaaagctgtatgacgggaaagtcatagatctttacttagaggatgtagagctcccgaacggaaaaacaagcaagcgggaaatcgtcaaacatccgggagcggtggccgtacttgcggtgaccgaggaaggaaaaattattttggtgaaccagttcagaaagccgctggaacggacaatcgttgaaattccggccgggaagcttgaaaagggggaagagccggaacatacggcgttaagagagctcgaggaagaaacgggatatacggcggaaaccttgacgaaaatcaccgctttttatacatcacccgggtttgctgatgaaatcgtgcatctctttcttgcggaagggctttcgccgctggaagaaaaacgagagctggatgaggatgaatttgtcgaagtcatgcaggtcacgcttgaagaggccgtgaagctgattgaatcccgcagggtgtatgacgcaaaaacggcgtacgcgattcagtatctccagctgaaagcagcgctgaaggaaaaatgatgaaaaccatctatgcggatctgcatattcatatcggccgcacctatacgggaaaaccggtcaaaatcaccggggccaaaacgttgacgctgcaccggattttagaagaagccagtgaggggaagggaattgaactattgggcatcatcgactgccattccccggaagtcatagaagaaatcgagcgcggaattgatgaaggcggataccgtgagctgaaagaaggcggcatccggtatcggaatacgacgcttctgttgggcagtgagcttgaaatctatgatcacacatgccgcgggccgattcacgttctcgtctttatgccgtctcttgccgaaatgaagatgttttctgagtggcttgcaaaaaggcttaaaaatatccaactcagttcccagcgcatttatgaaaccggtttgaatcttcaaaggaaaacaaaggaattgggcgggctgtttattcccgcccatatgttcaccccgcataaaagcctgtacggaaaaggagtcatatcttctttgacagaagttttcgacccgtcgctcattgacgcggcggaactcgggttaagctgtgacaccgacatggcttcgcgggtaacagaacttgatccgtatacatttttaacaaattctgatgcgcattccttaggaaaaatcggcagagaatataatgaaatgcttcttaaagaagcgaatttcacggaattttcgctggctttaaaagggaaggacggaagaaaaatcacggcgaattacgggctgaacccgaagctcgggaagtattaccggacggcttgcgaccgctgcggcagcccggttgaaaaaggagcttccgcatgtccggagtgcggggggaaaacaatgacaaaaggggtcagtgaacggctggaggaactgagcggaccgaaaaaaagccgcatgccgcggccgccgtatattcatcaaatcccgctgcagttcattcccggggtcgggccgaaaacgttagaaaaactgaagcgggccttcgggacggagatggcgattcttcatcaggcgcaagaagaggaattggcgcgtgtcgtccagcctaaaatagcggctgtcattcataaagcgcgtaccgggcagctcgtccttgaggccgggggcggagggacgtacggcagaatcaagccgtaaaagccggtttttaacggagctcctcctgcaccttctttttcgtgcggacaaacgcaatcaattcgatgatttcatcctgattcagcggctgtccgtcaacggtcagtgtgccgcggccttgtgcggcgtttgttaattcgatggtctgggcaaacggctccgcctttttttcagtgcgcccgagtaaatcgtcgcacgtcgtgtcaaacagatcggcaagcgtgcccagcgcctcgaatgacggacgccggtatcctgattcatacccggcgtacgtgcttttggcgatgccgagacggtcagccgtatattgaagagaccaatttttcttttttctcagttcagttaaacgatctaaattcatattcaaaaccgctccttttcacttgagcaaattatatcatatcgatatgcaaaagtgtacgcgaattgaataataatcacttgattaatttcattcgtctgtctataatttgattaaaagtatgcgaaaagcgaatgcttaacacatcttgagaaatggatgaagaggtgcagggtatgaaaaaattattgctgttaacaaccggaggaacaatcgcctcagtcgaaggagaaaacgggcttgcacccggggtgaaagcagacgaattgttaacctacgtatcaaaacttgataacgattacacgatggaaacccattcgttaatgaacatcgacagcacaaatatgcagcctgaatactgggccgaaatcgcaaatgctgtcaaagaaaaatatgacgcatatgacgggttcgtcattacgcacgggacagacacaatggcttatacatcagcggcactgtcttatatgcttcagcatgctgataaaccgatcgtcattacgggttcgcaaatcccgattacatttcaaaaaaccgatgccaaaaaaaatatcacggacgcgatccgcttcgcatgtgaaggggtgggcggcgtatacgtcgtatttgacggcagagtcattcaaggcacacgcgccattaaattaagaacgaaaagctatgatgcatttgagagcattaactatccgtatatcgcgtttattaccgaaaacggaattgaatacaacaaacaagtgcacatgccaaaagacgatgcttttacggtcaatacttcactttgcacggacgtgtgcctgctcaagctacacccggggctgaaaccggaaatgtttgacgcattaaagggcatgtacaaaggaatcgtcattgaaagctacggcagcggcggcgtgccgtttgaaggaagagacattctcgccaaagtcaatgaaatgattgaaagcggcattgtcgtcgtcattacgacacaatgtcttgaagaaggagaggacatgagcgtctatgaagtcggccgaagagtcaatcaagatctcattatccgctccagaaatatgaacacggaagccatcgtgccgaaattaatgtgggcgctcggccagtctcacaacttggctgaagtcaaaaacattatggagacaccgatcgcagacgacgttgtactgtaaaaacatgactaccacaaagagaaagtagggttttagcatgacaaacgcgcaaaaagaatatcgtcaggaaaaagatttcctcggagaaaaacaaattgaagctgatgtgtattacggaatacaaacgctgcgcgcgaaagaaaactttccgattaccggataccgcatccacgaagaaatgattaatgcgctcgccatcgtcaaaaaagcggcggcgcttgccaacatggatgtaaaacggctgtatgaaggaatcggaaatgcgattgtacaggccgcagatgaaattcttgagggaaaatggcatgaccaatttatcgtcgatccgatccaagggggagccggaacgtccatgaacatgaatgccaacgaagtaatcggcaacagggctcttgaaatcatggggcataaaaaaggtgaatacattcacctcagcccgaacacacacgtcaacatgtcacaatcgacgaacgacgtgttcccgacggcaatccatatttcaaccttgaaacttttggataagctccttgatacgatggcgcatatgctcagtgtttttaaagataaagcgaaacaatttgattctgtcattaaaatggggcgcacacaccttcaggacgctgtgccgatccgtctcggacaggaatttgaagcatacagccgcgtgcttgagcgtgacataaagcgaattaaacaatctcgccagcatctgtatgaagtaaacatgggggcaacggccgtaggtacgggacttaacgccgatccgcgctacatagaacaggttgtgaagcacctggctgacatcagcggactgccgcttgtcggcgccggccatttggttgacgccacacaaaacactgatgcgtatacggaagtttcagccgcgttgaaagtatgcatgatgaacatgtcgaaaatcgccaacgatctgcgcttaatggcttcaggtccgcgcgcgggacttgcggaaatttcattgcccgcccgtcagccgggatcatccattatgcctgggaaagtcaaccctgtaatggcagagctgatcaaccaaatcgccttccaggtcatcgggaatgacaatacgatctgcctcgcttcagaagcgggccagctggagcttaacgtaatggagccggtactcgtatttaacctgcttcaatccatcagcatcatgaataacgggttccgttcatttaccgaccattgtctggcgggaattgaagccaacgaaaaacgtctgaagcaatacgtggaaaaaagcgtcggcgtcattacagcggtcaatccgcacctcgggtatgaagcggctgcgcgaattgcccgtgaagcaatcatgacggggcaatctgtaagagatctttgccttcaaaatgatgtactgacagaagaagaattggatatcattttgaatccgtatgaaatgacaaaaccggggattgccggaaaagatctattagaaaaataaattttaaagcaacaacagccgccttttcacgttttttagtgaataggcggttgccatacaaagggatgaggcagtatagtataatttgttatatcatttgatgaaagcgttttagcttttttcttctagggggattttcttgtgaaagaggccagattgccaaatttattggaaattattatcttattattcgggtttttagcacttgtcttatcgttcacagtgtttttagacctgccgatccagctagctctattaatatcctggtttttcgctattattctcggagtcaggctgggatattcatataaagacttgcaggcttcgattgtcaccgggatatcaaacggtcttgaagcggtattgattctcgtttcggtcggtgcgctcatcgggacatggattgccggcggcgttgtgccgacgttaatttattatggtttagagtttattaatcctcatattttccttctggctacactggttatttgttccgttatgtccgttgcgaccggaacgtcgtggggaaccgtgggaaccgcagggatcgccatgattgccatcggagagggaatgggtataccgcttccgatcgtagcgggagccgttttgtccggggcttacttcggagacaagctttcaccgctgtctgacagtacggtgcttgcctccacgctttctaaggtggatgtgctgtcacacgtcagagcgatgatgtatctgtcaattccgtcctatattattacggccattctgtttaccgtaacgggatttatatacggcggaaaaaatattgatctcgacaaagtggaatttttaaaatcttcattgcagaaaacatttgacattcatatatggatgctcattccggctgttgtcgtcgttgtccttctgattttgaaaaagccgtctatgcccgttattatcatcggtgctttgcttggcgcaatctgggcttccgtctttcagggaatgaattttgctagtgccatcgcgactgcttataatggtttttctattaaaacggacgtcgaatttttaaacggcctgttaaaccgcggaggcattaccggtatgctggatacgttagtcgttatcctgttcggtctcggttttggaggaattctcgagaagctcggcgtattaaaagtgattgtctcaacttttgagaaaaagctgaccacaccgggaaatgtgacgctttcgacattgatcgtcgcccttttaggaaacattttcggctgtgcgatgtacgtgtcattgatcctgacgccgaaaatcatggagaacagttatgataaactgaaacttgacagaagagttttatcccggaacgcagaggtgggcggcacgcttacttcagggatggtgccgtggtctgataacggcatctatatggccggcattctcggcgtatccacattttcttatctgccgttcatgtggctcagttttgtatctatcggactggcaatattgtacggatacacggggaaattcatttggtacacgaaagaaaaatccttgcaatctcaaaaattgggttaggaggttcatttcatgattacaaagcatatgattcggacgttaatgattgaaacgccgactgttcccggaaatctcggaaaagtggcaaccgccatcggagtgatgggcggagatatcggggaagttgaaaccgttaaagtcggcccgaactacacaatgcgcaacatcacggtgcaggccgaaaatgaagagcagctgcaggaaatcattcaagccattgaagctctcggtgaaggcatccggcttcatacagtctcagatgaagtgctctctgctcatgaaggcggcaaaattcagatgaaaagcaaaatgccgatccggacactggctgagcttggccgtgtttatacgccgggcgtcgccgatgtgtgcagactgattgaaaacgagcctgaaaaagcgtccatctatacgacaatcagcaattctgtcgccattgtcaccgacggaacggcgattctcggcctcggcaatatcggctctgtcgccggaatgcccgtaatggaagggaaagccgcgctttttgaccagctggcgggtatcagcggaattccgattttgctcgatacctctgatccggaagaaatcattcgcacggtaaaacatatttccccggggttcagcggaattctgcttgaagatatcggttcgccccactgctttgacattgaagaccgcctgaaagaagaactggacattccggttatgcacgatgaccagcacggcacggcggtcgtcacgctcgccgccgccatttccgcttgtaaaagcgccggtcttgatttaaaagaagcgaaggtcggtcagatcggtctcggcgcggcaggcgtcgccatctgccgcatgtttatggcatacggagtcaaagcggtctgcggaacggacaagtcagaagacgcaatgaaccgcctcgctcagtacggaggtcagccgcttggaagcatcaaagaattaatggacacgtgtgacattgtgatcagcaccacaggagttccgggtctcattaaaaaagaggatgtcagaaaaggacacgtcattctggctttatctaatccgaagccggagattgaaccggaagaggcattacaagccggagccgcttatgcagctgacggccgttcggtcaataatgttctcggcttcccggggattttccgcggcgcgctgaacgccaaaagcaagaaaatcgaccatgaaatgcttgtggcggccgcagaagccatcgcctcttgcacgaaacacggcgatctcgtgcctcagcctttggatgcggacgtgcatcaagccgtatcagcagccgtagaacgggccgcggcagggaaataaacaactcttacagtaccggacatgtgccggtgctgtttttttatcatgaataggaagcggaattcttaggcaggctaacagatagcaaaagacggaataaagaggtgtcgatgtggattattttccgctgatccatacaaatatttgggatgctgtgatcggcgtgccggtcgtcttatgcgtcacacagctgatcaaagtgttctgccgggttccgggcatattcgttcccacgattgcccttgctgccggaaatgttgtgtctatcgttttcggtcatcatgaacacgtgtatgcggggatttttatggggtttttttacggatacgccgcaatggggagctattcatctgccaaaacgtctctgcgcgcttaccggtcgaaacatgagccgtattcatgaacacatctggatttttttgttatgataaagaaaagggaaaaaggagcggttggcacatggcgaagagcaaaacgaaaaaaatgcgggagcatctcaaaagaaacgggatgcgtgacgcagtcctgtcaagggggacagcgccgtctttcagcacccatgaaagagtgacgaaaaccaaaaaagacaggcttgaaagaataaagcataaaaaaaggaacccctatgatcaccggagtgatgacgggggttctttttttatgcctgaatctcgcgcctttctatgatttctctgtcatgttttctcttttctttcatacaatctactaaatcaagtcaatagattagcgggaggaaagcggtatgagaaaacaatcgtacaaagaactgttttttcgccatgtaaaggatcatctgtcactttatatatttgtgttcgtcttgtttttgatgggggtcattttcggggcgatcatcgtcaacagcatgaccatcacgcagaaagaagatttgtattactatttaagcaagtttttcggacagctgtctgacggaaaacatgccggcgcttcagaaatgttttggcaggccgtctttcatgatgtgaaatatttggggctgatgtggattctcggtatttccgtgatcggtcttccggttattttcattatggtgttcttaaaaggaatcgtcgtcggcttcacggtcggttttttagtgaatcaaatggggatgaacgggtttttcctgtcatttatttcggttctgccgcaaaacatcgttctcattccggcgtatcttatcatggggacatgctctatcgctttttcactgaaactgatccggcagctgtttgtcaaacgcagccttcatgacgcgccgatccaatggttcggacgttacgccttcgtgctgattctcatcgttttcttctcggtcatcgcctcgctgctcgaggcgtacgtgtctccgctgtttatggaaaagctgtcatcacgcatattttagaattattatcacaaaataatacttttatttatcagtttataataattatagttggaactctgcgcgtattttgttataatgagtcatggaatgcggcgtaggagggaaagacatggaaaaccgtattgatcgaattaaaaagcagctgcactcgtcaagctacaagcttacgccacagcgggaagcaacggtaagagtgctgcttgaaaacgaagaagaccatttaagcgcagaagatgtatacctcctcgtaaaagagaaatctcctgaaattggtctcgctacagtataccgtacattagaattattaacagaattaaaagtcgttgataaaattaacttcggggacggcgtatcccgctacgaccttcgcaaagaaggcgcggctcactttcatcaccatttggtgtgcatggagtgcggagccgtcgatgaaattgaagaagatctgcttgaagacgttgaagaagtgattgaacgtgattggaaatttaaaattaaagatcatagattgacttttcacggaatctgccaccgctgccgcggggatgaaacagagtaaaagcctacgaaccttttctgccaggaaagggttttttgctgtctttatgtataaaagcctttgaaattggcataaggtgtactaacagccgccaaaagaaagggtcgatcgaaagatgggcagattcctaaaaacagccgcggatacgatcaaagtgtttattctgttcacaggttttaccgcgctgttctattatgctatgatatgggtgaattcagagtatgaaaactatcatcggtacgataaaccggaaggctccgccgtcaaagtggccaaaacggaacatgaggagaaagacggctggttcggccgattgatctttttttaccaaaacggggagtagatcaagagtgaaggatcaaattaaggatttcatccattatgtgagggttgaaagagggctgtcccaaaatacgatgatgtcctatgagcgtgatctgaaaagttattctctcttcttaactgaaacccttcagatcacttcatggaatgatgtgacccgtcttcatattattcaatatttaaagcatataaaggactccgggaaatccggcaagacgtctgcgaggcatttggcgtcaatccggtcttttcatcaatttctgttaagggaaaaagccgcggataaagatccttcggtacatattgaaacacaaaaaacagagcggacgcttccgaaagtattggcgcttcaggaagttgagcggttattggacacgcctaagcttgacagcccgttcggcctcagggataaagccatgcttgaactgctgtacgcgaccggcatcagggtcagcgagatgatcgagctgaaattatccgacgtccatttgacgatgggatttgtccgctgcttcggaaaagggcggaaagagcggattgtgccgattggtgaagccgcttctcatgcgatagaagcatacattgaaaaagccagagggaaattattaaagaaaaacgtaaccgaagcgctttttctgaatcatcacggcaggcagatcagccgtcagggattctggaaaaacctgaaaaaaatcgcacttgaagcggggattaaaaaagagctgacaccgcacacgctccggcactcctttgcaacgcacctgctcgaaaacggggcggatctgcgcgccgtgcaggagatgctcggacatgccgatatttccacgacgcaaatttatacgcatgtgacgaaaacaaggctgaaggacgtgtacaaacagtatcatccgcgcgcttaggagccgctgccagaggggccgcggctttttttgccggattggcggaatacagagaaggttctaattatttgaatcggcattgtcaacaagaatgtaaacggtttatacttgagttgtctgacctctgtaagctacaatggacagatggaagaaaaggaggcttttatgatgtctgaatacaaatataaccgggtatttttgatcgtaatggattctgtcggaatcggtgaagcgccggacgccgccgattttaatgatataggcgcaaatacgctcggacacatcgcagagcacatgaacggcttacatatgccccatatggcgcagctcggtctcggactgatcggagacattaagggcgtggaaaaaacggagcaccctcttgcgtactacggaaaaatgcaggaggcgtcaaacgggaaagatacgatgacggggcactgggagattatgggcctctacattgaaaaaccgtttaaagtgttcccggaaggatttccggatgaacttcttcaggaacttgagcggcgttcaggacggaaaatcatcggaaataagccggcttcaggcacggcgattctggacgagctcggaaaagaacatatggaaacgggtgcgctgatcgtttatacatcagcagattccgtactgcagattgcggctcacgaagatgtcgttccgcttgacgaactgtacagcatctgtgaaacggccagagaactgacgcttgatccgaaatacatggtcggccggattatcgcaagaccgttcgtcggagaaccgggcagcttcaaacgcacgccgaaccgtcatgattatgcgctcaaaccgttcggccgcacggtaatgaacggaatgaaagacagcggattagacgtcatttccatcggcaaaatttctgatatttatgacggagaaggcattacatcttcccgccgcacggtatctaatatggatggcatggacaaagtgattgaaacgctcggtgaagagtttacgggtctgagctttgccaacctcgttgattttgacgcgctgtacggacaccgccgcgatccggaagggtacggtaaagcgctcgaggaattcgacgcgaggcttccggaagtgtttgagaaaatgaaagaagacgatctgcttatcatcactgcggatcacggcaatgatcctgtccatcacggcacagatcacacgagggagtatgtgccgcttcttgtgtacagcaaaaagcacaaacacactgaacagctgccgcttgcggatacatttgccgatatcggcgcaaccattgcggataatttcaaaacggaaaagccggaatacggaaaaagctttttatcaagattacagtagggggactttttttgaaacaaaagatcgaacgtgctgctgcatttattaaagaacacgtgaaagaaacaccaaagatcggtctgattttagggtcagggctcggcgtattggccgatgaaattgaaggagctgtcaagcttacatatgaaacgatccctgattttccggtctcaacggtagaaggccatgccggccagcttgtgatgggaacgcttgaaggcgtgcaggtcatcgcgatgcagggccgctttcattactatgaaggctactcaatggatcaggtcacatttcccgtccgcgtgatgaaggcgctcggcgttgaatctcttgtcgtgacgaacgcagccggcggtatcaacactgaattccgcgccggcgatctgatgattattacagaccacatcaactttacgggcaccaacccgttaatcgggccgaacgaagctgaattcggaccgagattcccggacatgtcagaagcctatgacaaagagctgtcaggcttggctgaaaaaacggccgatgagctgggcattcctgttcaaaaaggggtgtatacagctgttacggggccgtcttacgaaacgcctgctgaggttcggtttttaagaacgatgggttctgacgctgtcggcatgtcgaccgtgccggaagtcatcgtcgccaaccacgcggggatgcgcgtgctcggcatctcatgcatttccaacgcggcggcaggtattcttgaccagccgttatcccatgaagaagtaatggaaatgacggaaaaagtaaaaggcggctttttgaagcttgtaaaagccgtagtcgcacgatctcaaaaataagtcagcatcagtcagctgtttcttcggaagcagctgtttttttgtgccctcaacacgaaacattttccagatgaggcgtataaaaccaccggatttggaaaaaataaaaaggattatgaaatggagggctttggagatgaaacgtcttatatccactttgttgattggcattttattaacggcatcagcaccgtccgcttttgcaaagccggacggaaaacatacatcggagctcgctcatgaagccaaaagcgccgtgctgattgaacgcgatacgggaagcattctttataacaagaacagccgggagcgtctggcgccggcaagcatgacaaaaattatgaccatgcttttaatcatggaagcgcttgacaaagggaaaataaagatgagcgataaagtcaggacgagtgaacatgccgcgtccatgggcggatcacagattttccttgaacccggagaagaaatgacggtaaaagaaatgctcaaaggaattgcgatagcttccggaaatgacgcatccgtcgcaatggcggagtatattgccggttcagaagaggatttcgtcagccggatgaacaaaaaagcaaaagaattgggattgaaagatacctccttcaaaaacccgacgggactgcctgaaaaagaccattacagctctgcttatgacatggcgaaaatggcgaaggaattattgaagtatgataaaatcactcaatttacgggaacgtatgaagattatttaagagaaaacacagacaaaaagttctggctcgtcaatacaaaccggctgatcaaattttatccgggtgtagacggcgtgaagacgggctttacaggcgaagcgaagtattgtttaaccgccaccgctaaaaaaggaaatatgagggtcattgctgttgttttcggagccagcactccgaaagacagaaatgcccaagtgaccaaaatgcttgattacgccttcagccagttcaaaacacacccgctgtacaaacgggatcaaatcgtcggaacggtaaaagtgaaaaaaggaaaacagaaactgatcaagctgaccacatctgagccgatttctcttctggccaaaaagggagagaacatggacaaagtaaaaaaagaagtgaaaatcaacggcaatgtaacggctccggttaaaaaaggagaggtgctcggcagcctcgttctgaaaaaagacggaaaggtgctcgttgaaagcccggtcacggcaaaagacgacatggaaaaagcgggttttctcacttttctgaagcggacgatgggagattggactaaatttaaataatcgtggcgaacgggcactagttttgtcatagtgaaggaattgctttcccgaaaatcgaaacactcattatccgatcatatcaaggaggaatgagcatgagccttggaattgactttcatgtcaaagaatccgtgctttgtattcgattaacaggtgaactcgaccatcatacggcagaatcattaaaacaaaaggttactgaatcgctggaggctgacggcatccgtcacattgtgctgaaccttgaagatcttaccttcatggacagctccggcctcggcgtgattttagggcgttataaacaaattaaacagctcggcggagaaatggtcgtgtgcgcgatttcacccgcggtgagacgtctgtttgacatgtccggcctgtttaaaatcatcaggttcgaacaatcagaacaaaaagcgcttttaacgttgggggtggcatcatgaaaaacgagatgcatcttgaattttcagccctcagtcagaacgaatcgtttgcgcgcgtaacagttgcttcttttatcgcacagctcgacccgacgatggatgagctgacggaaatcaagaccgtcgtatcagaagcggtaacaaacgcgatcatccacggctatgaagaaaactgcgacggaaaggtgtacatctccgttacgctggaggatcatgtcgtctatctgaccatacgtgacgaaggcctcgggatcacggatcttgaggaagcgcgccagccgctatttacgacaaaacccgagcttgaacgctccggaatgggctttaccattatggaaaacttcatggatgatgtcacgattgattcctcgccggagatgggaacgacgatacgcttaacaaaacacctatcaaaaagcaaagcgctttgtaattaaggagatttgttatggatgtggaggttaagaaaaacagcaaaaacgcgcagctcaaggaccatgaagtcaaagaattaatcaaaaagagccaagagggcgaccagcaggcaagagacctcctcatagaaaaaaacatgcgtcttgtgtggtccgtcgttcaaaggttcttaaacagaggctatgagccggacgatctgtttcagatcggctgtatcggattgttaaaatccgttgataaattcgatttgtcctatgatgtccgtttttcaacttatgccgtgccgatgattatcggagaaatccagcgcttcatccgcgatgacggaaccgtcaaagtttcaagatctttaaaagagctcggcaataaaatacgccgggcgaaagatgaactgtcaaaaacatacggaagagtgccgaccgtccaggaaatcgcggaccatttagaaattgatgcggaggatgtggtgcttgcgcaggaagcggtgcgggcgccttcatccattcatgagaccgtgtatgaaaatgacggagacccgatcaccctgcttgatcagatcgccgatcattcagaagagaagtggtttgacaaaatcgccctcaaggaagcgatcagtgatttggaagaacgggaaaaactcattgtctatctgagatattataaagatcagacacagtcggaagtagccgaacggctcgggatttcccaagtccaggtatcgaggctggagaaaaaaatattaaagcagattaaagtgcagatggatcatacggaaagctgaccttttacgggccggctttttttatttgtgcatcggtggtaatttatggtcttttgccgctgatgaatgagaacaaaagtgaaccgcatactacatatataaccacccgaaagatggtgatgcaagatggaaagacgaatatttctcagacttcgccaccgcgtgaaggctcataccggagatatcatcacaatcggcgacgccgcgcagatcgcgggacagcaaaagctgaaaaaaaaactgtcggcactgccgctgtataaggtcacgaaaaaagacaaaaatatcgtcgtgctggacatcataaaagtgctgaaaaccattcataccgcttttcccgctcttgatgtacagaccgtcggcggcgctgaaacgatagtggaaatccattaccagaaaaagcagctgtcagccgttttgttcgtcggtgtctggctcctgctttttatcggttcatgtcttgccattatgaattttcatgaagatgtcagtatgagagaagttcatatcgccttatatgaaatcataacgggcgaacggaatgaatatccgtatctgcttcagattccgtacagcatcggcctcggtctcggtatgatcgtcttttttaatcacatcttcaaaaaacgcctgaatgaagagccaagcccgctggaagtcgagatgtttaattatcagcttgatctcgatcattatgtcgcaatgcacgaaaatgaagagacgatgaaagatctgcatgatcgttagcattcttttcgttatatttgtcgggcttggcggagggctgaccgtgggtgcgggatttgtggcttttttaaccgttatgggaatcatcccccgccttatgcagctgacaaaaacaatgcgctttgtacaggcctacgaaggagctgttatttcaggagctgtgttcggcggctgggaaaccttaaatatgaatcatttttttttaactgaatggctggccgttccggtcgggcttttggccggcatgtttgtcggcatgctggccgccgcgcttacagaagtgctgaatgtgcttcccattcttgccaaacggatcggcttcggcagcaaaatcatcatattgctgatggccattgtgttcggcaaaatagccggctctttatttcattggctgtattttatccatcattcataaggaggaaccgacatgacaaacttaaaagaaaattacaaaacaaaagtgaaagactatcagccgaaaccgccatatgtttggaattgcgtcaaagcctttctgatcggcggtttgatctgtctgatcgggcaggctcttcaagacttttacatccacttttttaattttaatgaaaaaacagcgggcaacccgacggccgccactcttattttaatttccgcccttttgaccggattcggcatttatgacagactcgggcagtttgccggagcgggttcagccgtgccggtgacgggttttgcaaacagtatgacaagcgccgctctggaacacagaagtgaaggactcgtgctcggagtagcgacaaacatgtttaaattggcgggaaacgtcattgtattcggcgtcgtggcagcctatatcgtaggcctgatacggtttgcttgtgaaaaactgttttcgtaggaggagaaaaaatgaaattgaccggaaagcaaacctgggtgtttgaaaacccgttatttgtaaatgcggcgggaacggcagccggaccgaaagaaaaagacggcccgctcggttcgctgtttgataagacatacgatgaaatgcattgcaatcagaaaaactgggaaatggcggaacgtcagttaatggaagatgccatcaactccgctttgcaaaaacagaacttgaaaaagagcgatattgatttgttactcgcgggggatcttttaaatcaaaatgtgaccgccaactacgtcgccagacatctgaaaattccgttcctctgtctgttcggcgcctgttcgacatcaatggaaacgattgccgtcgcatccgcgctcattgacggcggttttgcgaaccgtgcgatcgcagccacgagcagccataacgcgacggcagaacggcaattccgcaatccgacggagtatggcgggcaaaaaccggataccgccacttcaacggtcacggggggcggggcggtcatcatcagtcaaaacccttctgatatcaagattacaagcgcaacagtgggaaaagtaagcgacctcggaataacagatccgttcgatatgggatccgccatggcgcccgctgccgccgacacaatcaaacagcacctgcaggacttaaaccgcacggcggatgattatgatctgattttaacgggagacctttcaggcgtcggctcgccgatcgtgaaagatttgctcaaagaagaaggctatcccgtgggaacgaaacacgatgactgcggtcttctcatctatacgccggaccagcaggtgtttgcgggcggaagcggctgcgcctgctccgcgcttgttacgtacacacatatttttaaccaattaaaagcggggattctaaacagggtactcgttgtcgcgacaggagcgcttttgagtccgacaatgatccagcagaaggaaaccattccgaccatcgcgcacggtgtggtatttgagcgggcgggaggtgcatcataaatggaatatctgttggcttttgtttgcgggggaatcatatgcattatcggtcagctgctgcttgacatttttaaactgacacccgcccatgtgatgacaacttttgtcgtcatcggcgccttgttagatgggttcggaatttatgacaaatttatcgaattcgcgggcgcgggcgcaacggttcccatcgtcagcttcggtcacagcttattgcacggcgccatgcatcaagctcacgagcatggatttatcgggatcgccatggggatttttgaacttacttccgccggtatatcttcagcgattttattcgcatttcttgtagccgttatttttaaaccgaaaggataatgcctgatgacgaaacggaaggtcattcttgtgacagacggggacgtgtacgccgccaaaacaattgaatatgccgcggaaaaagcaggcggacggtgtatttcccaatcaaaaggcaatccgtcaacgagaagcggccccgaacttgttcagctgattaaagccgcgccgaatgacccggtgtttgtcatgtttgacgattcaggcctgcaaggggaagggccgggcgaaacggcgctgaaatatgtcgcctcacatcaggacattgaagtgctgggggtgattgcggtcgcttctaagacccatcaggctgaatggacgaaagtcgatgtctccattgaccgtgatggagaagtgacggagtttggcgtcgataaaaccggaatgagagaaatggacgagcacagaatgaacggagatacggtgtattgtctggataaattggacgttcccctcattgtgggcatcggcgacataggaaagatggggagaaaagatgacatatccaaaggctcgccgatcacgatgaaggcggtcgaattcattttagaaaggagcgaaagccatgccggaaaaaccggaaaacatgatcaaggtgtaccgggatcctagaaaaaatgaacaattttttaaagaccgcgtcggtatgggaacgagctatgatgtcggcgtccgcaaagttcgagtattagaccgggaagtccagatttactttgtcaacggattaaccgatactttgtttatcattcatttaatggaacagctcgtcgacgtcaataattatgacgagaatgcggatgaagcgattgacgttgttgaaaacaggcttgtcaatcagcaggtccaaaaagtcaaaacgctcgacgaagcaacggatcaagtgctttccggacttgtggcggttatcgttgaagacgcgggcttcgcctttatcgttgacgtcagaagttatcccggacgcacacctgaagaaccggatacggaaaaggtcgtccgcggtgcaagagacggttttattgaaaatatcgtcattaatacagcattgatcagaagacgaatcagggacgaaaggctccgcgtcaaaattacgaaagtcggcgagcgctctaagaccgatcttgcgattgtgtatatagaagacatcgcggacccggaccttgtcagcatcgtcgaaaacgaagtgaatgcgattgacattgacggattgacgatggctgataaaacggtggaagaattcatcgtcaaacagggttacaatccgtttccgatggtcagatacacagagcggccggatgtggcagccaatcacattttggaagggcacgtcatcatcgtcgtcgatacgtcaccgagcgtgatcataacgccgacaacgatatttcaccatgttcagcatgcggaagaatacaggcaggcgccttcagtgggcacatttttaagatggatcaggtttttcggtattattgcttcaaccgttctgcttccgatttggttcctctttgttctcgaaccgtctcttctgcctgaaagattggattttatcggtttaaataaaaatacgcacatcccgatcattctgcaaatctttttggccgatttggggattgagtttctcaggatggccgcgatccatacgccgaccgctttatccaccgccatgggtctgattgcggcggtgctgatcggtcaaatcgccatagcggtggggctgttttcagcagaagtgattctgtacgtatcgatcgccgccatcggatcatttaccacgccgagctatgagctcagcctcgccaataaaatgatacgcctcatcttaatggtgctcgtggccattttccaagtaaaaggctttgtgataggttttacattgctgctgatcataatggcgaatatccgctcgtttcacacgccgtatttatggccgtttttaccgtttaacggcaaggcgctgtggcaggtgctcgtccggacgacagtgccgggagccaaagtcagaccgagcattgttcacccgaaagaccgtcaaagacagccaagcggttcataatcgcattgaaaccgacagaagattatgatattgtatgtcttaacttatacgggacttgtataaggacagctcaaaagaagctgtccttttcacccatatgcggatcagaaagagggaatgagcattgttcttacatggcacaagcagacaaaacaaactaggtcatttggaaatcggaggtgtggacgcgctgtatttagcggagcattacggcacgcctctttatgtttacgatgtggctttaatacgtgagcgcgctaaaagctttaaacaggcattcattgacgcggatttaaaggcgcaggtcgcgtacgcgagcaaggcgttttcttccgttgcgatgatacagctcgctgagcaggaggggctctcattggacgttgtatccggcggagagctgtttacggcggttgcggctggttttccggctgacaggattcactttcacggcaataacaaaagcgaagaagagttgaaaatggcgctcgatcatcaaatcggctgcattgtcgttgataatttttatgaaatatccttactcgcggaactgtgccgcaaatcagggcgcacaatggatgtgcttctgcggatcactccgggggtagaggcgcatacgcatgattatattacgacgggacaggaagattccaaattcggttttgatctgcataacgggcaaatagaaaaggcgattgaacaagtattacagtcagaccatatccgccttctcggcgttcactgccacatcggatcgcaaatttttgatacggcgggctttgtgctggccgcagaaaaaatctttgcaaaactgaatgaatggagagaatcattcggctttgtctctgaagtgctgaatttagggggcggctttggcatccgctacacggaggaggatgaaccccttcatcccgccgtttatgtggaaaaaattatcgaagcggtaaaagaaaacgcagcgctgcacgcttttgacattccggagatctggattgaaccgggacgctcgctcgtcggagacgccggaacgacgctttataccatcggttcgcaaaaagaagtgcccggcacccgtaaatatgcagcggttgacgggggcatgagcgataatatccgtcctgcgctgtatcaggcgaaatatgaagccgtatcggcaaacagaatcggagaacaccacgataaaacggtatccatcgcgggtaagtgctgtgaaagcggtgatatgctcatttgggatatagaccttccggaagtgaaagaaggcgatcttctcgccgttttctgcacgggagcatacggatacagcatggctaacaactacaaccgcattccgcgtcccgccgtcgtttttgtggaagacggcgaagcgcatcttgtcattagaagggaaacttatgaagacattgtaaaactggatctgccgtttaagacgggggtcaaacaataaataaaaaagagaccggaacaatggcgtccggtctctttttgcattcagctgttgttagaacttgatccgctgtctcctgtaaatacagacacgatcgcattccaaatcgaagcgaagaagtcaatgactttttgaacaaagcttttgccttcatcggattgaatgaacttcgtgattttgtcttttgccttgtcaagctggctgccgacttggccccaatcaatcttggcatttttcattttattaaacaatgaaacgagctggtctttttgagcgtcagtcagtgtaatgttaaggtttgaagccgcatcatcgacctttttctcaattccttcttttgtatcgggcacaccgtttttcgcgaaatcatctttaatgtttgcgatgagcgcggaggcgtttttatccccgattttatccccgagatttgaagtggtgacaagctcttggttggcgacctgttttacatcttctgaaatcgctttgtctgatgagacttcatatgccttgatgattcccgttaatgctgcggtgcctgatacctcaaacggcgccgtcacgtatactttcgcatctttcactcctgctgtcatcagggcgtttaagtacatttcatccgtgatggaatcgatattatgggtcttaacgtcaagcccggaccctttctttgccaccgtgatggatgatgaagagatggctcttgtgccgatttgggcattcgatatatattttcccagatattcatgttcttctttattcgtgaccgtcacttttgtcgcgttatcagggacatttaattcgtcaagcactttctgacggttttcgtttgacagatccgcccccagtgtgacgatgacatctccgactgcggcatcggccaggctgattttcggtattgtgcacaatacaacggccgccgccagcaatccaatccacatttttttcaaagcggttaacctccttcttttcacaaatgccgttttgaagcggtttgtgagggcctgcgtgaagcagttccgatacatagacggctgtgaagctgttctggtttcattttctttctgcggaagcggggagattcgttttccggctgaaggtgtggtataatagccgcgaaaagaagagcagaggcctcttccttcaaaagaatatcaaaaagaaagccggcttacaattgaaattcatattgaagaaggctttgacaaaaaacaatacggaagtaggaatgagaatgaaaactggttatatcgaaatggaaaacggcagcagaatcgaatttgaactttatccgaatgaagcgcctaatacagtcgctaactttgaaaacctggcgaatacgggcttttatgacggcgttattttccaccgcgtgattccgggctttgtgagccaaggcggagatccgactgggacaggcatgggcggaagcggaaaaacgatcaaatgtgaaacagaaggcaatccgcataaacacgaagccggttctttatcaatggcgcatgccggtaaagacacgggttcaagccaattcttcatcgtacatgagccgcagccgcatttaaacggcgttcatactgtattcggaaaagtgacaagcggtttagagcatgcgaaaaacatgtctaacggagacaaaatgaaagaaatccgtgtagaaggataatgacaaaaaacccgcctttttcaggcgggtttttttatgtatatgaaaattctcatgtgtaaatcatgaaaaaatacatatatgaacatcagcgatcattctggtatagtgaaaaagaccgattacaacaatgaaaagaggtagaaacgttggttcaattggcaaccgttttatttgtcattatcattctcgcacttatgatttggttcagggtgaaaaagggaaacaggccgattaaaggcggcggcttcggcatcattctcccgctattgattatcgccgtcatttttacattcagcatcagccagctcatgaatatcccgggaaagccgtttcattttcccgctctttgggagctcgccatcgccggactgttaggcgcggtattcggcgtcatcatgctgtcgcaaaccgcctatgaaatccgggaagacggctttgtctactccaagcggaataaaaactttaaatatgtcattatcgcgattattgcgatccgtatcgtgctcagccaatatttcaaaaacattgacgcggcggaattcgccgttttaacgatggaacttgcttttgtgtatttgtgcatttggcggatcggaagcttcgtgaaataccgtaaaatcagcagatccggcttataaaatgaaaaaaatggatgaggtgcggggcttatttgccctctgtgcagggattcatggtaaaataaaaacgaccatggctaatgggaggaaatcacttgaaatcagaaaaagaaaaaacttctaaaaaaagcgccgtacttgattgggcgaaagccattatcatcgctgtcgttctggcactgctcatccgaaactttttatttgccccttatctcgttgatggaagatcaatggatccgacgctgcatgaccgcgagagaatctttgtcaatatgacggtcaaatacataagcgacttcaaacgcggccagatcgtcgtgctgaacggagaaaacgagcactatgtcaaacggattatcggacttcccggcgacacggtgcaaatgaaaaacgatcagctgtacatcaacggcaaaaaagtgtccgaaccgtatttagcggcaaacaagcacaaggcgaagcaagaaggctatgaccggctgacagaagacttcggcccggtgaaggtgccggacgacaaatatttcgtcatgggtgataaccgcagagaatctatggacagccgcaacggcctcggtctctttacgaaaaaacaaatagcgggcacatcaaaattcgtcttcttcccgtttaacgaaattcgcaagacgaaataaaccgtacaggcagttttcttcatgaggaaaactgctttttttatataaatttatctttccaccctcaaaaacagaacataaattcgtatatctatttaatagatagaaagttttacagatacatgaaacatcttccctttatgaaacgttatatgaataactcacgcagggaagaacggttttctattcatgaaaaaaaggaatatgacatagtaatgaatagattgatacgggctggaggtagaaaaatgggaagaattaaaacaaaagcagccattttacttgtactgctgctgttattagcgggcggttatatggtcataaacgatattgaactgaaagacgtgccgactgcaatcggacaaaccctgtcccaggaaaaagaagaatatacagtcaaaacatataaaattacgaaaatcgaaggaactgagtaccacggtacggcagaaaacggcacaaaaattatttttaacggcgacaagctgaagcaggatctctccgatgtgaaaaagggagataagattaaagcgtatttcagcaaatcaaaccggattgacggcttattgaaggtcgtcaaagtgaacgaataaataaaggcaccttttatgggaaaagggcgctttttatttttctgaataattaggtgcaaattcattgcgcctgccgcaaaggatgttataatagcggataaggacaaaaaaatattgattgtatccttcggggctgggtgaaaatcccgaccggcggtaataaggcgttttgcgctttacagcccgtgacccgtatgcatctgtatacggtggattcagtgaaaagctgaagccgacagtgaaagtctggatgggagaaggatgagagaagctatgcaaaaaataaacttactgtatagtcttatttcctatggattaaaactggcaaagccccgaactgtgtaaacattcggggcttttttgacgccaaattgcgtggaagaagggagggataacgatggaagaatattatatgaatacggcaatagaacttgccagacgcggtgaaggacagacacagtccaatcctcttgtcggcgctgtcgtcgtcaaaaacggacagatcgtcggaatgggcgcccatttgcaatacggagaagcgcatgccgaggttcacgcgattcatatggccggcagacacgcaaaaggcgccgatttgtatgtgacgctggagccttgcagccattacggaaaaacaccgccatgcgccgaactgataataaagtcggggataaaaagggtgtttatcgctgtgaaagatccgaatccgcttgtagccggaaaaggcatcggaatgctggaagcagcgggcatcgaagtgaaaaccggacttctcaggcagcaggcagaagagctgaataaaatgtttcttcacttcatgcggaccggacttccgtatgtcaccttgaaagcggccgcgagccttgacgggaaaacagcgactgaaaccggtgacagcaaatggattacatcagaggcggcaaggcttgatgcccagcaatacaggaaatcgcatcaaagcattcttgtcggagcaggcacagtcaaagccgataatccgagcctgacctgcaggcttcctgatgcggtgaagcagccggtcagagtgattctcgatacaaagctgaccattcctgaaacggcaaatgtgctcactgacggcgctgcgccgacatggatatttacggccaaaggtgcagacgtgcaaaagaaagaccggctgaccgcactcggaataaaagttattccgctggaaacagaccgcattcacgtccctgaggtgctcagtattctcgctgaaaacggcataatgtcggtttatgtggaaggcggagcatccgtacacggaagttttgtcaaggaaggctgtttccaagagcttcatttctatttcgcccctaaattaatcggaggaacgcttgctcccagcttgatctccggtgaaggttttcaatcaatgaaagatgtcccccatttacaattcacacaaatcacccaaatcgggccggatataaaactgacggccatacctaaagatggaaaggatggtgacgatgtttacaggaatcgttgaagaaacaggcacgatccaagcaatcaaaaagacaggcctttccatggcattaaccatcgccgcttcaaaagtgacaagtgatgtgaaacttggcgacagcattgcggtaaacggcatctgcctgaccgtaaccggattttctgacaatcaatttacggttgatgtcatgccggaaacagtgaaagccacttcgctgaacggcttgtcaaaaggcagtaaagtaaacttggaaagagcgatgtccgccaacgggcggttcggcggccactttgtatcagggcacgtggacggaacggcggaaattacgcggatcgagaaaaaaagcaacgcggtctattacgatttaaaactttcgccggaactgacaaaagcgctcgtattgaaaggttcaattacggtagacggcgtgagcctgacgattttcggtttatcagacgaaagcgtgacggtatccatcattccgcataccatctcagaaacgatttttcagacgaaaacagtcggatcgaccgtaaatattgagtgtgacatgatcggcaaatacttataccgctttttgcacaaaacagaacaaacgaaaagcaatcaaactatcacggaagcctttttaagcgagaacggcttttagaaaggaagatcgatatgtttcatccgatagaagaggcgttagaggcgctgaaaaaaggtgaagtcatcattgttgtcgatgatgaagacagagaaaacgaaggagatttcgtagcgctggctgagcatgccacgccggaagtggtgaattttatggcgacccatgggagaggcctgatctgcacgccgctgtctgaagacatcgccggccggctggatcttcacccgatggtcgatcataatacggactcacatgagaccgcgtttacggtcagtattgaccacaggctgacaaaaacgggcatcagcgcgcaggaacgatcctttaccattcaggcgctgttgaacgaagaatctgtgtctgacgattttcagcgtccgggccacattttccccttaatcgcaaaaaaaggaggcgtcctgaagcgggccggccatacggaagcagccgttgaccttgcaaaagcctgcggatctcagggagcgggcgtcatttgtgaaattatgaatgaagacggcactatggccagagtgccggagttagccgaaatcgccgaacgccaccagctgaaaatgattacgataaaagacttaatagagtaccgttacaacattacgacccttgtgaacagagaagttgatattacgctgccgactgacttcggcacgtttagagtttacggatatacaaacgaggttgacggaaaagaacatctcgcctttgtcatgggggatgtcccgtttaacagcgaacccgttcttgtcagagtgcactcagaatgcctgacgggcgatgtgtttgcatcccatcgctgtgattgcggacctcagcttcatgccgcgcttgcgcaaattgctgaagaaggccgcggcgttctattgtatttgcgccaggaaggcagagggatcggtttaatcaataagctgaaggcgtaccgattgcaggaacaagggtatgacacggttgaagcgaacgaagcgctcggctttctgcctgatctgcgcaactacggcatcggcgcccagattctccgcgacttaggggttcagcatatgaaacttttaaccaataacccccggaagatcgccggcctcgaaggatacggtctcagcatttcagaacgggtgccgcttcaaatggaagcgagtgagcataacaagcaatatttaaagaccaaaatgaaaaaacttggacatctgcttcatttctaaaaacaaatctcacaaaaaaggatggataacatatgaatatcatacaaggaaacctagtaggaacaggacttaaaatcggaatcgtcgtcggcagatttaatgaatttattacgagcaagctgttaagcggagcggaagacacgttgcttcgccacggtgtagaatcaaacgacattgacgtcgcttgggtgccgggagcgtttgaaatcccgtttgcggcaaagaaaatggcggaaacgaaaaaatacgatgccgtcattacgctcggcacggttatcagaggagcgacaacgcattatgactatgtctgcaatgaagcggcaaaaggcattgcccaggcgggaacggcgacgggcgtcccggttatcttcggcatcgtgacgactgaaaccattgagcaggccatcgaacgagccggaacaaaagccggaaataagggagcggattgcgcagtatctgccattgaaatggcaaatttaaaccgttcatttgaataatttgttgaaaagcgtttaaaacagcggcgaaaatgatataatgtgaggaaacggatcgcctttatgtatccgtttgataggacatgaatggacattttggatatagaggggtttttatgttaattcgttataaaaaatcgtttgaaaagattgcgatgggtcttctgtcatttatgccgaatgaaaaagatctcaagcagcttcagcagacaataaaggactatgaaacggatactggccgccagctctttctttggaaagaggatgaagatatcgtcggagcgatcggagtcgaaaaaaaggactcagaagttgaaatccggcatatcagcgtgaatccttctcaccgccatcaaggaatcggaaagcaaatgatggacgccttaaaacgtctgttcaaaacggaggcactcgttccgaatgaattaacgcaaagcttttttgaacgctgtcaacatcaaaaagatcaggatatctcatataataactgacaaatgctcccggaatcttcacggtttcgggagctgttttgatatagaaaaagcagggctgaccgtcagcctctgcttttttttcttctctcaatttcccgttcgcgttccttaatgacatccgtcctgtcccgcaggcggtgtttatgaataagaaaggtatctgatacgccgtcttgcccccatgtatagccctttcggcggcattcggcaagacatgcttctttcagggcttcatctgtaatcggcagcataacacttctgtaaggcacgcccgcttctatatcgtctgacagcgtttctatcagctcaatcagcttcgggtggctgagaccgagagaacagaccgcctgcttttcagaccggagaatacgtaagctgttggcaatcagccgtttcgccccggcttcatttcccctgcgctggtgatacagagcgacggcaagctgaatcaggccgacccaatgaatgctccgcttttcagccgggctttctttccaatattcctctaacagttcatgacactcaaaataatctcttgatgcgtgaaattcggccaaaaagccgatataagctttaggatacaagccgcttcctccttttatgctaaaaccagtgtaccacagcgctatgaaaaggaaaaaaagagcggcttggtgtctgaagcctgaggaactagcagatgtaagatgctcctacgacaacgagcaaaataaacagaacgacaattaatgcaaaacctccgccgaaacaagctccgctcatgtgaaatcagcctccctttgtttcaagtttacacggctatcatatgtgcatccgcctttaaaggtataggcgtatatcttctttttcagtattttctaaataacggaggacgtgtataaaagtattggacgagagcatttcggtggattatactaaagggtagccagtttttccggcaatgagagtgatattgaaaatggtgagataatggtagaatatcaagtgaaaattgatacgtttgaaggcccattggacctgctgcttcatctgattaaccgtcttgaaatcgacatatacgacatacccgtggcaaccattactgaacaatatttattatatgtacatacaatgcaagagcttgaacttgatgtcgccagtgaatatctggtcatggcggcgacgcttctcagcattaaaagcagaatgctgcttccgaaacaagaggaagagctgtttgaagacgaaatgcttgaagaagaagaccctcgggacgagctgattgaaaagctgattgagtatagaaagtataaaaccgctgcgaaggatttaaaagagcgggaagaagaaagacaaaagtcatttacaaagccgccgagtgatttaagtgagtatgcaaaagaaatcaaacagacggagcagaaactgtcggtgaccgtttatgacatgatcggcgcgtttcaaaaggtgcttcagcgtaaaaaaatcacgcggccgaaagaaacgaccattacaaggcaggaaataccgattgaagacagaatgaacgaaatcgtaaaaagcttaaaaacggcggggagaagaataaacttcacggagctttttccttctcggcaaaaggaccatctcgtcgtgacgtttttagcagtcctggaactgatgaaaaatcagcagattatcattgaacaggaagaaaacttttcagatatatacattacggggagtgaatccattcatggcgcttgatatcgtgaattggaaagcgattgtggaagccctgctgtatgcggcgggtgatgaagggctgaccaaaaagcaattggtgacggtgcttgaaatagaagaagcggaactggccggaatcatggaagaagtggccgctcagtacaaggaagacgacagaggcatcgagcttaccgaatatgcggatacgtatatgcttggaacgaaaaaagaattcgtgccttatttgaaaaaactaatcgaagtgccgtcaaaagggctgtcacaggcttctttggaagtgctggcgatcgtttcgtacaagcagccgatcacacgggcggaaattgaagatatccggggcgtgaagtctgagcggattctgcacagcctcgtgtcaaaagcgctgctgtgtgaggtgggccgcgccgacggtcccggccgggcgattttatacggcacgacaccggtatttcttgaacaattcggcttaaaaacattggaggagctcccgccgcttcctgaaaatgcggaggaagacgttctccaggaggaagccgatttattctttgaaaacttcaaccaaacttttgaggatattaaataataatcgtttttcatcatacgatagtagggaaaggccattgatgaatgacgcaaatgacgacgtacaagagaggaaggaaacggacggaaatgggaaattcgattgtgagggcccatactgaagaaactggtgaatttttagccgaggttgtcacgatggtcagcagctatttaaatcatacaactttgccggagatgcgggctcaaggagaggcggatgaagcatactgccgcgacgtgctcagtgtgctgaggaggatgaccgtcttttgcgaaggcgcccaggaagcctgcaggcggcttttaatgcaggagccgtttcatgaggcgagagcggaaaaaacgctgtataaagtatatcatcagtgcgtggaggagtttttcatgccgaaaaaggatacatggtacgaaaacagccgcgccgcttatacaggccaaagcgcgattgaattctaccagcaagtgccggactcgctgcggagccttctgctttcgctcagcagtgaatttctgcgcatgcgggaagaattggcgcaatatgaagcatcaggctcaaatatggcatcagtcagataaaaactcttccttttgggagagtttttttatgtgaaagtgatgcaattggtattcataagtcatggacatgcgcataaacttgtacaaacccacaacaaggacgtgagcattcatgcgctttctcaaaaaagctgccgtatttcttttgacttttgttattcttttttccattacagacggcaatacggcacatgcccaaatacatgtcagcgcaaaaagcgcgattataatcgacggagcatctggcagggtgttattcgtcaaggatgaacatcataagcggcggattgcaagcattacgaaaatcatgacggcggtgctggcgattgaatcagggaagatggaagagaccgtgacggtttccccgaatgccgtaaaaacggaaggctcagccatttatcttcagccgggacaaaaagtaaagctgaaagatctcgtatacgggcttatgctgagatcaggaaatgacgccgctgcggcaatagcggaatatgtcggcggaagccttgacggttttgtatttttaatgaacaaaaaagccgagcaaatcgggatggaaaatacaaaatttcaaaatccgcacgggctggacgaccatgaaaatttatattcaacggcgtttgacatggcgcttttgactaaatacgcgatgaaaatcaaggaataccggaccgtttcaggcacaaaagtgtataaggcggaaacgatggaccgggtatggaaaaataaaaacaagcttctgactgggctctaccgttacagcacaggcggaaaaacgggttacacaaaaatcgcgaaacggacgctcgtctcgacggcctcaaaagacggtacggatctcatcgcggtcaccataaatgatccggatgactgggatgaccatatgaatatgtttaattatgtctttgatcactatagaacctatgtcgtcgctaaaaaaggcggcattccgaagctgaaaaagacgttttacggaaaacacgcttttattgcccgggatgtcaaatatttgttaaaagaggatgaaatcgacgatgtaaaaatcagcacaaccttaataaaaccgaaaaaagcctggaaaaaggacgcctctctcattcctgatgtcgtcggccggatgactgttatgcatgatgggaaagtgatcgccaagatccccgtctattatgaaaatgagcgccataaaaaaccgaaaaagcatttcattgagacgtttacgagcctgtttatgagcgcggcgggcggttcgtcatggtcaatttaatctgggtatgtctgacggtaatcggacttgtctttgcgatgtttaacggtaccttgcaggatgtgaatgaagccgtttttaaaggagcgaaagaagcggttacgatctcgttcggattaatgagcgttctcgtgttctggctcggcctgatgaaaatagccgagcagtccggccttttggatatattcagcagaatgtgccgcccgtttatttctaagctgtttcccgatattccccctgatcatccggcgatgggatacatcttatcaaatctcatggcaaactttttcggactgggaaatgcggcgacaccgctcggcattaaagccatggagcagatgaaaaagctgaatggaggtaagtctgaggccagccgttccatgattacctttttggcggtaaatacttcgagtattacattgataccgacaaccgtcattgccgtgcgcatggcttactcggcgaaatcaccgaccgatatcgtcgggccgaccatcttagcgactttaatttcgggaatcggcgcgattttcattgaccgctacttctggtaccgccgcaaaagaaaagggaggtaagcgaatggaaatggtgaattgggtgtctttagccatgattccgattattatcgccggtatattgatatacggcacgatcaaaaaagtgccgacgtatgaatcattcgttgaaggcggaaaagaaggaattgagattgcgttttccatcattccgtatttggtcgggatgctggtggcgattaccgtattccgggcctcgggcgcgctggattttgtcatggggctgtgcaagcctttctttacagcgctcggcattcccgcagaagtcgtgccgcttgctctgatccgcccgatttcggggacggcggcgctcggcatgacgacagatctgatcgccgtgtacgggcctgattcatttatcggcaggctggcctcggtcatgcagggatcgactgacacgacgctgtatgtcctgacggtgtatttcggggcggtcggcatcaaaaaaatgggggatgctttaaaggttggtcttcttgctgatttgatcggggtggttgcatcaatcatcatagttacgttattatttggaagcgcctgaaatcaggcgctttttatatatcagaataactctccttgaaaaagcttgtttgttcaaggggaaaaaagtaagattatacttgaggtgaacgacatggaaagactgcaaaaagttattgctcatgccggcgtggcatcacgcagaaaggcggaagagctgataaaagaaggaaaagtaaaggtgaatggaaaagtaataacagagctcggcgtaaaagtgaccggttctgatcagattgaagtaaacggattaaaggtggagcgggaagaacccgtgtactttctgctttataaaccgagaggagtgatctcagcagctgatgacgacaaagggcggaaagtggtgaccgactttttcaaagaagtgccgcagcgcatttatccgatcggcaggcttgattatgatacgagcggacttttattgctgacaaatgacggcgagtttgccaacaaactcatgcatccgaaatacgaaattgataagacgtacgtcgctaaagtgaaggggattccttccaaggaacttctgagaaagcttgagcgcggcattcagcttgaagaaggcaagacggcgccggccagagcgaaaatgctttccctggacaaaagaaagcagacgagcatcattcagctgacgattcatgaaggccggaacagacaggtccgccgcatgttcgaggcgatcggtcatgacgtgctgaaactaaaacgtgaagaatacgcatttttagatttaagaggcctgcgcacaggagacgcaagagaattgtcgccgcatgaggtgaaaaggctgcgggctttagctgaacacggtaaaaacgctttctaattttcacataaccttcaaaaattacaaaacgtgttgatgatataattgaatggatttgcaggcaggggaggggagcagtgtacaatgaacaaaaaacggcggcgtttattcattcggaccggcatccttctcatcttactctgcgcgctcggatataccatctataatgccgtatacacaaacggtgagcgtatatctgaggggtccaaagccccgaatttcgcgctgaaagatacagagggcagactcatagaactgagtcagttaaaaggaaaaggtgtttttctgaatttctggggaacgtggtgtgagccgtgcaagcaggaatttccctacatggagaatcaatacaagcattttaaagacctcggtgtcgaggtggttgcggtaaatgtcggcgaatcaaaaattgcagtacataattttatgaaaacatacggcgtcaatttcccggttgcgctcgatactgaccggcaagtgctggacgcgtacggcgtatcacctattccgacgacatttttgatcaatcccgacggaaaagtcgtgaaagtggtgaccggcacgatgacagaacgcatggttcatgactatatgaatttaattaagccggaggcgtcttcatgaaaaaggtcaaatgtgaatgcgggcacgtgaatccagccgggacggttttgtgcgagtcgtgcgggaagccgcttgatgatcaaaaatcgccgcttgccgatatgcggtacgacggcagcgcaaggcgttcgcaaacatataataaaacaatcgtagataaggtatggaacttcttttcttccgtaaaagtcggaatatggctgatcgtcattactctggcggcgtctgctttcggcacggtttttccgcaggaagcttatctgccgccgggcgcccagccggatacatattatgaacagcagtacggcataatcggccaaatgtattatctgttgggatttcatcacctgtacggctcatggtggtatatgctcctgatcgcatctattggcatatcactggtcatctgcagcctggatcgggtgattcctttgtacagggcgctgaaaaatcaaggagttcggcggaatccggtctttttgaagaggcagcgtctatacagccggacagaaaccgagctgagcggggatgcggctgatagcctcagaacacgattgaaaaaaaagcattatagagtgcgagaacaagagggcagcattctggcggaaaaaggccgtttttcaaggtgggggccctacgtcaatcatatcggcctgatcatttttctgatcggagccatgctgagatttgtacccggtatgtatgtcgatgaaacgctctgggtccgtgaaggcgaaaccgcccagatcccaggtactgacggcaaatattacttaaaaaacaaccggttcacgatgcagacatataacaaagacactgagaaaaaagtattcgccgacgccattgacagagccggaaacggcaaagtcgccaaatccttcacaacggacgcggttttgtataagagggaaggcgacattgtattcggtgaaaagccgaagcttaaaagagtcaaagaaaacaatatccgcgtcaatgaaccgctgcgctttgactcctattctgtgtatcaggtggactataaagaaaaccagctcgatcagatggtatttcacctgatcgaccaaaaaacaaaacagtcattcggcaaactgaagatcaatcttctcgatcccgacacggactatgatcttggtaacggttacaaagtgcagatcgccagttatcttcctgatttttattttaacaaggacggagaaccgagcacgaaaacgaaggttcctaacaatccggcttttgtctttaaaatcacggctcctgacaagccgaaaggggagaaaagttttgttgcgattcagcagactgttgaaggttccgaaagtaacaagtacaaattaaaattcgaccatgtggaaacgaaaaacattacaggactcaccgtcagaaaagacttaaccttatgggtgcttgccgtcggcggcgcgatctttatgatcggcgtcattcaaggaatgtactggcagcacagaaggatctggatcaaaacaggtgatcatgaagtgcttgtggcgggacatacgaacaaaaactggttcggtctgaaaaaggatatcgaatttgttcttagcgggaccgggattcaagagccggccgatcaaaaagaattggccaaaaatcaggcctagtgaaaaaggagtggtgtcatggcggagctgagcgcaaattttctttatgctgcctttttgatttatttaattgccgtcccggttttcggcggcgccatccggggaacaaaaggtgctaaggacggtaagggccgctggtcggctatcggaatcacgttaaccattttcggatttctttgtcatctcggctacttcattgcgagatggtcggcaagcggacatgcgcctgtcagcaatatgtttgaatttacgacgtcattcggcatgatgcttgttctcgcttttattattatttactttatttacagactgccttcattaggcatgttcacattgtctatcgcgcttttgcttatcgcatatgcaagcatgtttccgacagacatcacgccgcttattccgtcactgcagagcaattggctgtacattcacgtcacgacggcggcgctcgggcaggcgattcttgcgatcagttttgtagccggcgtcattttcctgttaaagcatgtcgaccaatccagaccgggcaaaaaaacgttctggcttgaagtcatcatgtttatactcgtgacgaccgtggcatttatcgccgtcacgtcggcattccggctggcggactacaaagctgaatttaattgggtggataaaaaagaagccaaaagcgtcatgatatatgatatgcctgcgcttgtcggcccgcatgagggagaactgcttacggaaggcgcaatgaagccgcttattgagcttccagccattttttcaggcagaaaggtcaatacggtgatctggtcgtttggcgcaggtctcgttttatacggtgcgctcaggctgatattcagaaagagaatcagcgctcttatcagcccgctcgtcaaaaatgtgaatctggacttggtcgatgaagtcggctaccgcgctgtttccatcggttttccggtattcacactcggcgcgcttgtgtttgcgatgatttgggcgcagcttgcatggacgcgtttttggggctgggacccgaaggaagtatgggcgctgatcacctttttattttacgcagcgtatttgcacttgcggctgtcaagaggctggcatggcgaaaagtccgcgtggcttgccgtcatcggcttcgccattattatgtttaacttaatttttgtgaatctcgtgcttgccggacttcattcgtacgcatagatgcaaaaagccgatacagttctcaagctgccgcacagtttgttaaaatgaaagtaacagaaggaaagcagggggaaaacgatggatcaaacaaatgaaactaaaatattagtagtagatgatgaagccagaattcgacgccttttaagaatgtaccttgaacgggaaaactatgtgattgaagaagcggaaaacggcgacgaggccattaaaatggggctggcatcagattatgatctggtgctcttggatttaatgatgccgggaacggacggaatcgaagtatgccggcagctcagagaaaaaaaagcgacgccgattatcatgctgacggcaaaaggggaagaagccaaccgcgtccaggggtttgaagcgggtacggacgattatatcgtcaagcctttcagcccgagagaagtggtgcttcgggtaaaggcgcttttaagaagggcttcccaaacatcttatctgacagccaataccccgacaaaaaatgtgctcgtcttttcgcatctatccattgatcacgatgctcacagggtgactgcggacggcacggaggtgagcctgacgccgaaggaatatgaactgctgtacttcctggcgaaaacaccggacaaagtgtacgacagggaaaagcttttaaaagaagtgtggcagtatgaatttttcggagacctcagaacggtggacacccatgtcaaacggctccgtgaaaaattaaataaagtgtccccgggagcggcgaaaaaaatcgtcaccgtatggggagtcggatacaaatttgaggtaggcgctgaatgaagttttggaaaagcgtagtaggaaagctttggtttaccattctttcactcgtgttaattgttttatttattttaacggtgctgcttctggaatttatagaaaattaccacgttgaagaagcggaaaaagatttaacgcagcttgccgacaaaattgcggtcataatagaaaatcatgaagaccagccgcttgccagatccatcacgtgggaactggcggacaatttaacgagcatcgcgatcattcaggatgataagcatgtctggtattcgcccaatgacgataatcatttatcctctattacattagagcagatcaaacatgaccgggatctgcacaaggcgctgacagaccgcaaaaaagtaagcaaacgcgcggtccccaacaatgccggttcggataacgaacggctgatcgtcggagtgccgtatgaaaaagacggcaaaaaaggcatggtctttttatcccaatcgctgcttgccgtcaaagatacgacgaaacatacgacacgctatatttttcttgcggcgggcattgccatcgtcttgacaacgtttttcgcgttctttttatccagcagggtgacatatccccttcggaaaatgcgggaaggcgcccaagacttggcgaaaggaaagtttgatacaaaaattccgattctgacccaagatgaaatcggggaactggccattgcctttaatcagatgggacggcagctcaatttccatattaacgcgctgaatcaggaaaaagaacagctgtccaatattttaagcagtatggcagacggggtcatcaccattaatatcgacggcaccattttggtgaccaacccgccggccgaacgttttctgcaggcatggtattatgagcagaacatgaacattaaagaaggagacaaccttccccctgaagcaaaagagctatttcaaaatgcagtgaacacggaaaaagagcaaatgattgaaatgacgcttcaaggaaggtcatgggttttattgatgtcgcctctttatgcggaatcacacgtccgcggcgccgtggccgtgctccgtgatatgaccgaagagcgcaggctggataaattgcgtgaagacttcattgccaatgtcagtcatgagctcagaaccccgatttctatgctgcagggatacagcgaagcaatagtggacgacattgcaagcaccgaagaggagaaaaaagaaatcgcgcagatcatttatgatgaatctcttcgcatgggccggctcgtcaatgatttgctggatttggccagaatggaatccggacatacgggcctgcactatgaaacggtaaacctgcatgaatttctggagaagatctcccgcaaattttccggggtagcgaaggaaaaaggcgtttcgctcacagaggacatctcagtgtctcagccggagtgtgtctttgatgaagacaaaatggaacaggtgtttaccaaccttatagataatgcgctgcgccatacggagtcaggcggaagcgttcatatcgcggctcagaccgtaaaagacggactgaagatcgatatcaaagattccggctctggaataccggaagaggacctgccttttatttttgaacgtttttataaagcggacaaagcaagaacaagaggcagggcgggaaccggactcgggctcgccatcgtaaaaaatatcgtggaagcccacggcggctcaattgcggttcacagcagcatcgacaaagggacgacgtttacattttatattccgacaaaagtgcaggatgacgtctgaaattgacgaacaatcttgttccatacgaaacacccgcatgttctgcgggtgttttttatttgtttctcctttaaaaatttaagaatatgttaatataaattcccttccaaattccagtttctcgtaatatagttgtaatgtaacttttcaacgcatttttacgacaaaaaagtgaacggaggggtttcccatggaagaaacctttcagatattatatgatgcataccatcaagatttatatcaatttttattttatatggtaaaagataagtcgcaggctgaagatttgacgcaggaagtgtatatccgcgtcttgaattcctatcatacatttgaaggaagaagcagtgaaaaaacatggctgttgtccatcgcacgccatgtggcgattgactggttccgcaagcagcagacgatcagacagcgtattatgggtacgtttgattgggatacacaagatgtcagagatcagcatttgcttccggacgaactcgccgtacagcatgaaaacgtccgggaaatttataccgcgcttgatcattgcactattgatcaaagagctgttattatcttgagatttattcagggatattccattcaggaaacagccgccgctctccgcttctcggaaagcaaagtcaaaacgacccaacacagagggctcaaaatacttcggaaacagatggagcttttgagggaggagctaatggatgatgaagtcatattggaacgaagaaagagtagaggagttgttaagacaacttccggcggttagagatcatcgttcacccgaggccatttaccggaatattgaaacgggtaaaccgtacaggaaaaaaccggcccgaagctggatcggccccgccgcagccggcgtctgcgcattgtgcatcgctctgattatatctcctcacctgatgacaaacaaatcttccggtgatcttaccgctgacagccgccagacagaaaaagccagtcagtcagcttctgtcaagccgccggatcagaagacgttcgtcgtctcaaaccaaaacaaaaacaattacattactttggcatttgccgattcagaaacatccgccgtcattccggtcagttttgaaaaaaagaagccggatgaatcggtttcagaggctttatccgaagcggaagacctagaagtgcccgaatccttcctgtctgtgccgaaccttttggacggtgtgcaggtaacggcggataagaaggatttgcttgtgcaggtaaacggacggctctctatcgaatcagttgccgatgctgacttattgaaaaagatgctgaaagagactttgacatggagcccttacgagcggattaaattgaaaaaggttcaaaacggagccggacaggatttttataaatcttacggcatttccgctgagatgtctgtacataaacagacaaaccgggcgtatttttcttacagcgacagtctgggacaagagtatctcatcccgtctgaacaaacctattattcagtatatcaggctattgacgggatgaagacaacagatgaaggctcacagactgcgagcattatagaagcagatgcgattgcatcggtatcggaaagggaagacggcgagcagctgcggattcaattgtccgaaaaacataaggttgaagattcgctggaagggattttaatgatcgaagggcttctgttaactgcgaaggaattcggttattctgaggtgctgttcacacatgcgcatacaaagaaaatcggtaattatgatgtgacaaaacctatcgctgtgcctgccgcgcctaatccgcttccaagccattaaacgtaaaaaaacccaaaacatatgaatgttttgggttttttgttggttacggaaggtcaatcagtttaacggaaacaatatcctgaattgaagtcagctcattgacgactttatcatctaaatgtttatcaaaagaaagcatcataatggcttctccgcctttttctttacggcctacctgcatggtagcgatattgatatcgttatcgccgaggatgcgtcctacgcgtccgattacaccggtcgtatcctggtgctggatataaacgaggtggccggcaggatttaagtcaatattaaagccgttcagttcaacgattcgttcaccgaagtgagggatatacgtagccgttaacgtaaatgtgctccggtctccggttacttttacgctgatgcagttatcatatcctgattcattggaggaaatcttctcgctgaagctgattccgcgttcttttgctacaccgccggcgttcacttcattgaccgttgagtctacacgcggttttaagaaaccggacagcaggctttttgtaataaatgaggtttcaagtttggcgatggtgccttcatattgaatcgcaacatctttgacgggttccttcatacattgtgacacgagacttccgattttatcggcaatttggtgataaggctggatttttttgaattcatctttcgtcatcgcaggcaggttgatcgctgacatgacaggcagaccttttgcaaactgcagcacttcttcagaaacctgtgcagcgacattcagctgtgcttctttcgttgaagcgcctaagtgaggtgtggcgatcaccagcggatggtcgggaagctttgattcaactggcggttccacttcaaacacgtcaagggcagcgcctgcgacatggccgctttccagcgcttccaaaagcgccgcttcatcaataatgccgcctcttgcgcagttgataagacggacgccttttttcgttttggcaatggtttctctgttaagcagtccttttgtttcctttgttaaaggcgtgtggacggtaatgatatccgcgctttcaagcacttcttcgaatgtccggctgtttacgccgattttaccggctctctcttcggttaagaaaggatcgaatacatgaaccgtcataccgaacgctctggcgcgctgggcaatctcgcttccgatccggcccagaccgacaatgcctaaagtctttccgtagagctccgccccgacaaaagccgtccggttccattctcttgattttactgagatattggcttgcggaatgtgtctcattaatgaagaaatcatcgcgaatgtatgctctgccgttgaaatggtgtttccattcggcgcgtttatcacgataaccccatgttttgtagcctcatcaatgtcgatgttgtctacgccgacaccggctctgccgacgatttttaaagaggtcatttttttaaacaattcttcggttactttcgtggcactgcggactaacagggcatcaaaggtatgtaattcatcttctgcatccgcgacgtttttttgaacaatttctataaagtctgattccatcagcggctttaagccgtcattgctcatcttatctgagaccaaaactcgaaacattgttagatttcctcctagtttagctgactaaatatctgataatttatcatattctcaatagagtgtcaatgtgtattgacgcagtaaaggagaaaaggaaaccgctgaatcagcttaaattgggcttccccaatattttatttaaatttgagcagttctctatacaattgcaatttgatcatatataatgtgaataaattcataagatcaatcttcggggcagggtgaaattccctaccggcggtgatgagcatcatgctctaagcccgcgagctgcttcggcggcaggatccggtgagattccggagccgacagtatagtctggatgggagaagatggaggttcagcagacgttttgatgcttatatcaaacgtttctttgccaagccttagtaagctcccgctttttaacaaaagcgggttttttattggggcgcaaaagaacctttcctcttttcgagagatttgatcgaaaaggagagagcattgtgaaagtagaaaaattagttgtcatcagtatgcttagcagtattgcttttgtgcttatgctgttaaatttcccgtttccggggctgccggattacttgaaaattgatttcagtgacgttcctgcaattatcgccattttggtttacgggcctgcggcgggggttgcggttgaagcgattaaaaatattctgcagtatatcattcaaggaagcatggccggcgtgcctgtcgggcaggcagccaattttatcgcgggaacgctgtttattctgccgacggcgtttatgtttaaaaagctcaattcggcaaaagggcttgcagtgagcctgctggccggaaccgcggcgatgaccgtgctgatgagtattttgaactatattcttatcctgcccgcgtatacttggtttttacattcaccggcactgtcaaacagccagttaaaaacggcggttgtcgcaggaattctgccgtttaacattgtaaaaggcgttatcatcaccattgtctttacgttcatctttacgaagctgaaaccttggattgaacaaaaacgcagcatccagacacaataaccactccaaagcgcccgctctgtaaaacacagaccgggcgcttttttgattgtttgatcacgcaaaaaaaataagactccggccgataacagccggagtcttattcaggacgaaaaagctcctctcacggggagggcttttttattcgtatttcagcgggtcgccttcgaacggttcatccgcaactttgattgaatcagtagggcatccttcaaatgcgtcaatcatatcttcttccagaacttccggaacttcgacgacgcctttattttcgtcaagcgtaacgaacgcaatgccttcatcatcataatcataaatgtctggtgccgcagctccgcaggcgccgcatgcaatacacgtatctttatctacaattgtgtactttgccatgaataaaacctcccagattgttcgtgttggaacaaatggtttaccttatatatttttaaatataacacctattcctcttacttattgtaatgatgttagtgtcaaatttcaacagaaaaatgattgagaatgcttatcacataagggattctctttagcacttccccctaaaagatgactttaaacgtcaaatttatatgaaaatctgttaaaataaaaagaaccaaaaaacgaaacttgtcacagaagaaatgtaggtgtgtttagattggcgataaactactttgataccgtggttctcgactgtctggacaaaatagacggcgaacggactccgagtgctgtgtttcatttattaaaaggaaaaaagtcgtctcaaaccattcaggatgccggcttatttcagatcgctaaatatttcggcatggcttcacattgtgaacgcggcgatattgcggcttctttgcataaactcaccgagaactcatacattacagccggaaaagaagagggaacgtggaaagtgactgcgcgcggcgttcaaaagcttgaacgggcgtttgccgagcggccttggccgaagcactgccacggcgcgaattatcaaacgcctgctgtcaccctgtggaggcggctttccctgctcattcaagtcctgtcaaacaaagagcatcaatgcagtcaatatatcccggttacaaacgatgtgcagacgctgagatgggtcaaacggttcatgcggaaaaacatagacgctaaagagctctccgtccaaatgcatgagacgctgtttcaccttctgcaaggcgtaagtgaacggcaggcgcttatttttgtctattctttaacttcattcaacagaatcggcaaaacgaataagcagcttgctctccagttgaacgaagatgaatggtatgtgtccgtccagttttggggagcggtacattatgttattcaatcgcttccgcaatgtgcatatcccgctctgcgcgagctgttgtccgatctgcaggcggaaagcgcgctgacacagtctgccagaaaaacctttgagctgttggaaaaagggtttccgattgaacggatcgccgcggtcagaaatttaaaaaccgccacaatcgaagatcatatcgtagaaatatcattgcatcagcctgcattttttacagaacagtatctttctgaagaggaacagcgtatgataacggcatttgcaaaacagcatcaaacgaataaaattaaacggattcgcgaaggaatgcagatgcgcttcagctattttcagatcaggctggcgctggcaaagacggtgaatcagcatgactgagctgcataaagctttatccaggtattttggtttgcattcctttaaaaaagggcaggaagagattatgactagcgtgctccaaaaaaaagatacgatcgccatgcttccgaccggcgggggaaaatcattatgctatcagctcccgggttacatgatggacgggctggtgctgattatttcaccgcttctatcattaatggaagatcaggtgcagcagctgaaagcgaaaggagaaaagcgggttgctgcattaaacagcatgctgaattccgcagagcggcattttatcctcagcaacatcagccggtataaatttctctatatgtctcctgaagccctttcttcaccttatgtgctgaaccgtttgaaaaatgtcccggtcagtttatttgttattgatgaggctcattgcatatcagaatggggacatgatttcaggcctgattactcgaagctcgggcctttcaggcaggcactcggaaagccgcctgtattggcgctgaccgcaacagcgacaaaagaaacgctcagagacgtgacggatgtgctcggacttgagcatgcggtgcgtcatctttattcagtcaaccggccgaacattctcctggcggcagaacatttggctgataataccgaaaaaataagcaggctcacggagcttgccgaaaagcttgaaggcccgggtatcatatattgtccgaccagaaaatgggcggaagagcttgcggctgagctgaacgaaaaaacgggaaagcggacggattattatcacggcggaatggatacaggcgacaggattttaatccagcagcaatttatccataaccagcttgattgcatttgctgcaccaatgcgttcggcatgggtgtggataagtcagatatccgctttgtcattcacttttatcctccccaaacggccgaggcctttatgcaggaaatcggcagagcgggacgcgacggcagcccgagtgtcagtattttgctgagggcgcccggcgataccgagcttcagcagcagattattcagacagaaagcctgtctgattatgacctggaaggcattctggccgtcatacgggatgccggtacgggtgatgaacgaaagcttcgggacgttctgatcaataagggagtccaggaaacacaggcgcgaacggccgtccatctgtttctgcaaggaaaaaccacaaaagaccagctgcgggaagaactgacataccgtgtggaaaagaagctgcgtaaaatgaatcgtttttcggcgttattagagcggaaagaatgtataagagaagcgctgctgtcttattttgatgaaccgtatgagcctgatggtcaaaccggacaatgctgcagcagctgcggacttgatctggctccgtacgagcaaaaaggagaacgtaaaaatatggaacggttagaagattggaagctggaattaggccggattttcggatcagagtctgcgggtgagttcagctgagacggcaaagcgaattgatccggcagctctcagaccgggagattgtgatgcagctgtacgccacccaattgctcatattggcggtttcagctgttatcggctttttcttttttaccgacattcacgattttttaaagctgtggcatatacgtgacgataatatcatatggtacggtgtaactcttgccgtccttgtcatttttgccgatctggcggtgatgaaatggtgtccttcgcatttatatgatgacggcggcattaatgtattgctttttaagaacaggccggttctgcacattttgtttttgacgcttctcatttcgttcagcgaagagattttgttcagaggcgttctgcagacacatatcggcttatgggccgccagcttcatttttaccgtgcttcatttcagatacttggcgaagtggcttctgtttatgatggttgcgggcatcagtcttttgctggggcttatctatgaatggaccggcaatttattcgttccggttacagcgcattttattattgatgcggtatttgcctgtcagatccgttttcaatatgttaggaggggtttgcatgacggaaatgtcaagagttgaaagaagaaaagctcagctgcgtgccgagcagcaggttgccgcggccgcggatgaacaaattgaatatcttgaagacagcctcccgacaagacaatctgtaaaagaggagcgtaaaaaaaaggaagagcaggtgaaggaaaaaaccaaaacaaaaacgccgctgttcacttttctgaccgtcctgttcattatcgtaacaatcggtgtctttttcggtcttctttatatgacgaacagcagcagatttgacccgaaggactatgaagatgtcttcatagaccacagtgaaagcgcgcctgccgttattccgaaaggcgctcagaaagaaacgtcagaaaccgctcttttagaacaaccgaaaaaaaagtctgacgacaaagataagaaagaagcggctgcacctgaaaaaacgaaagaaaaaccaattgaaaaaccaagtgaaaaaacacctgaaaaaacggaaacgccctcagaaaaacaagtaaagccgacagacaccgattacgcggagacaaaacagcagtctccgccggctgtccgtgaaaaagcggctccggctgaggcgagtgatcaagccgggactgtcccaaaaaaagtgcggaccgtacagcatactgtacagccgaaagaaacgctttaccgcatttcaatgaaatattataaaagccgggcgggcgaagaaaaaatccgcagctacaacggattaaacggaaacgacgtgtacaccggccaggttctgaacattccgctgtctgattaaaataaatgcatgttttcaccgcgtttttcatatagtgtaccaatgaaaacggacaaggtgtgaagcgcatggattctttatggaagcaattagaccgatttgctgacggaccgacgaaacaaatgcttcaggcgctggtgaaacggaaattaaaatacgaaaattatgccgcacaatgccgaagatggcagtgggcgtccctcgtttgtttttccctgatgtgcatactgctgatgtttaaaagctttaatgccccccaagcctctccgcagctgattctgcaggaaatattaggccatacggtttacttgtgctggattatggcttccgcttttgcgtattgcacttcttattatttcaaaaaaaaggaagaaaaagctgagggtgaatttcataaactgaggtgtgaaattatccaaaaaagcacggatttatggccccagcctgaaaaatggagggcgagagaatctgtttttcacttgatgaaacatcggtatgatatcaatctttattttgaaagcaaataaaatgaggcgttttccggaaaggatagaaacgtctttttttgtttgtccgtctaatataagacaatgacagaatggagagtgcgtttatgaagcttacagcgggaattctcggctcattggcgggagcggctgcggttatggcggccgttatgtacaaaacggcaaacggcagccatctgaaaacacatacatttacgcttgataaaatgaaggggatgaagccgctcaccatcttttttatatctgacgtgcaccgccgtttaattgatgaaaagcttctccgcgaagcggcaggttataagccggatgccgttttgctcggcggtgatttggcggagggcggagttccttacgccagaattgaagaaaacatcaaacgtctgacggctcttgcgcctgtcatgtatgtgtggggaaataatgattacgaggtcagccagcaaaaactgctctctcttttacgggcatataaagtgatcccgctgagaaatgaatcggttcagtttgcttataaaggggaaaccgttacgatctgcggcgtggatgatatcaggatgatgatggatgattacgatgctgcaatcagatatacggatgctgacaaagtaaacctcctgctttgccataaccccgacatccatgagcagatgagggagtcagacgggattgacgctgtgttcagcggccatacgcatggcggccaaatccgtttcggccggttcgggccgtacgaattgggcgggacgggaacggtaaaaaaagcgcattacctgatcagcaacggctacgggacgacaaaagttccgctgaggctcggggcgaaaccggagacgcatatgattacgctgtgcggaccggatgagccgtcttcctgaaacaaacccggccgcggtgataaaaaacggcattctgcttgtcttcccgctgtacacggtgtaaactgataacaaattaagaacctatgactcatttattcatatactgtgttatatgatttgtgtgcaagaagaggcaggagggaacattatgcggcttgagcgtctgaactataataagattaaaatctttttaaccctcgacgatctgactgatcggggactgacaaaagaagacctctggaaggactcgtttaaagtccaccagttatttaaagatatgatgaatgaagcaaatacagagctcggctttgaagcgaatggtccgatcgcggtggaagtatattctcttcaggcacaaggcatggttgtgattgtaacgaaaaatcatgacgcggacgcagaagatgacgaatatgacgatgattatatcgagatgcaggtcaaacttgacgaaagcccggatattatttatcagttccattcgtttgaagatatcattcagcttgccggaagccttcaccgaatcgggattaccggcggcaccgtctaccactatgagaaccaatactatgtaagccttgaagacctcggctcccgttccgccgaaggcgtcatcgcggtgctggctgaatacggacacccggcgacgattacgatttacaggctccatgagtacggaaaactcatcatggacggcaatgctgtggagaccatccagaaacatttttcataaaaaagatttgaaacggcagctgttttcagcggccgtctttttttaagcgaaataatggaaaaatcattgtctttcttctatgcacggagatattgaaggtgtatactagtcactgaaagggagcatgagagaaacagaagattttaggaggttaactcaaatggcagccgatcgattcaccggtcataatgaagaagacaaacatgatgtattaaaatcaacccaaaccgtaatacataaagctctggaaaaattggggtatccagaagaagtgtatgaactgctgaaagagccgctcagattattaacggttaaaattcctgttcggatggatgacgggtctgtgaaaatatttacaggctatcgtgcgcagcacaatgattccgtaggtccgacaaaaggcggcattcgttttcacccgaatgtaacggaaaaagaggtgaaagcactttccatctggatgagtttaaaatgcggaattattgatcttccttatggcggtggtaaaggcggaattgtttgtgatccgagaaatatgtcattcagagagcttgaaaggctgagcaggggatatgtcagagcaatcagtcagattgtcggaccgactaaagacgtcccggcacctgacgtatttacaaactcacagattatggcttggatgatggatgaatattcaagaattgatgaatttaactcacccggctttattacgggaaaaccgcttgtactcggcggatcccacggcagggaatcagcgacggcaaaaggcgttaccatctgcataaaagaagcggccaagaaaaaaggtctcgatattcagaacgcgcgcgtcgtcgtacaaggtttcggaaacgcgggcagctatctggccaagtttatgcatgacgccggcgcgaaagttgtcggaatttctgacgcgtacggaggcctttacgatccggacggtcttgatattgattatctgcttgaccgcagagacagcttcggaacggtgacgaagcttttcaatgacaccattacgaatcaggagctgcttgagctggactgtgatatacttgtcccggcggcgatcgaaaaccaaattacagaagagaacgctgaccgcatcaaagcgaaaatcgttgtagaagcggcaaacggaccgacgacactggaaggaacgaaaatcctgacagacaaaggaacgctgctggttcccgatgttctggcgagcgccggcggtgtaacggtttcttatttcgaatgggttcaaaacaaccaaggcttctactggagtgaagaagaagtcgaggaaaaactggaaaatatgatgataaaatcgtttaataatatttatgaaatgtcccaaaaccgccggattgacatgaggcttgcggcttacatggtcggcgtgcggaaaatggcggaggcttcgcgtttcagaggctggatataaaccaatcgtttgcataaacaaaaaaaatctcctatgataatataggagattttttatatgagtggaaacttatgatggaaatgccaatcgcaggagttgaaggacatgacagaagaaaaagcaattataataggcggaggtccttgcggattatcggcggctatacatctgaagcaaattggcgtgaactcgcttgtgatcgaaaaagggaatgtcgtaaacagcatttataactatccgacccaccaaacttttttcagttcaagtgaaaaattggagatcggcgatgtcgcctttattacggaaaacagaaaaccggtccgcatacaggctctctcttactacagagaggttgtcagaagaaaagagctgcgcgtaaacgcctttgaaacggtggagcgcgtaacgaaacaggaagacggccgttttcttgtagaaacatcaaaagaccgctacctcactccgttttgtatcattgcgacaggatattatgatcatccgaattatatgaacataccgggtgaagggcttcctaaggtatttcattactttaaagaaggccatccttattttgataaagatgttgctgtgatcggcgggaaaaactcaagtgtggatgcggctttggaactggtgaagtccggtgcgcgcgtcacggtgctctacagaggacatgagtactccccgagcatcaagccgtggattctgcctgagtttgaggccctcgtcagaaacggcacaatccggatggaattcggcgcttgtcttgaagaagtgacggaagatgaaatcattttccgctccggccgaaatgagacggtccggctgaaaaacgatttcgtatttgccatgacgggataccatcccgatcacggtttcctcgaaaaaatcggtgtgcggattgatgcggaatcaggccggccgtttttccgggaagaaacgatggaaacaaatgttgacggtgtttttatcgccggagtcattgcggctggaaataacgccaacgaaatttttatcgagaacggccgttttcacggcggcttgatcgcaaatgaaatatcaaaacggctgggtgcagagagcatatgatcattcatatgctcttttttaaaaaaattgaaagatgtaaaaatatgaacaacatggtacgatagatataggaatataaaggaaagaggttgcctgatgtttgcaatcatctctgcaggaattgctcccggcattgcgctgttaagctatttttatttaaaagatcagtatgacaatgaacccgtacatatggtgctgaggtctttttttctcggggttgtccttgtgtttccgaccatgtttatccaatatgttcttgaaaaagagcatgtggggggaggaagctttttcgtttcgtttttgtcttcgggatttctggaagaatcggtgaaatggttcgttctgatgatcagtgtgtatccgcatgctcattttgatgagcattatgacggaatcgtttacggggccagtgtgtctttaggatttgccacgcttgaaaatattctgtatctattcggccacggtgttgagcatgctttcatcagggcgcttctgccggtctcctgccatgcgctgatcggagtgattatgggattttatctcggaaaagcccgcttttcgcagaaaaaagcccgtgtcaaatggcttgtgatttcgctggccgtgccttcatgtctgcacggttcttacgattttattcttaccgccctcaatcattgggtatattatatgctgccgtttatgctgtttttatggtggttcgggctgcgaaaggcaaaaaaagcacgctccgtcaatatgatccaagtgtgaagaaaccgcgcgtcgcgtgcggtttcttttttatgccttgacaggggataagaaggaaacgtgcataaaaataacctcgtgacagacaatacgggtacactttaaattttgcagtaggaggcttgaagagatgaagtgcaaaggagcctttatggcatgtctcattctattttctttcgccgccgctttcttcgatcatcatgaaacggttcatgcgttttcaaatcaagtgattcaaagaggcgcgacgggtgatgatgttatagaattgcaggcccgtcttcaatataacggattttataacgggaaaatcgatggtgtttacggctggaccacatactgggccgtgagaaattttcaggagaaattcggcatgaaaccggttgatggcctcgtcggcgcaaaaaccaaacaggtgctgatttcaaaatcaaaatattaccgtgaatatgtaatggagcagatccaaaaagggaatacgttcactcattatggcaacgtcccattggaaaaccaaacaaaaccgagagccggaacgcagaagccggcgggaacgaataagcctgctcaaaagccgcaaaacaatacaggcggtcagtcaaatcaaaagcaaaatacgacagcggccaatatgcctggcggtttctcaaacaacgacatcaatcttctggcacaggctgtgtacggggaagcacgcggtgagccgtttgaagggcaggttgccatcgccgcggttattttaaaccgtattaaaagcccgttatttccgaatacggtggccggcgtcattttcgaaccgctcgcgtttaccgccgttgccgacggccaaatatatatgcagccgaatgaaagagcaaaagaagcggttcttgatgcgatcaacggctgggatccttctgaaaacgcgatttattatttcaatcctgatacggcgacaagcaaatggatttggggacgtccgcagataaaaagaatcggaaaacacattttctgtgagtaaaagtacgcaaaatgaggtgttaacatgattagaggaatcattatcgctgttctcggtgtcgcgatcgccgcaaccggatactggggatataaagagcatcaggaaaaagatgcggtccttctgcatgcggaaaataattatcagagggcttttcatgaattgacgtaccatgtagatcagcttcacgacaaaatcgggacgacgcttgcgatgaacagtaaaaaatctctgtctccggcgctcattgatgtatggcgaataacatctgaagctcataacaatgtgagccagctgcccctgactctcatgccttttaataagacggaggagtttttatccaacataggagatttcagctataaaacatccgtccgggatttagatcaaaaaccgcttgataagaaagaatatacaacactgaacagcctgtacaaacaggcggagaacattcaaaaccagctccgcagcgttcagcatctcgtcatgagcaaaaatttacggtggatggatgttgagatggcgctcgcctctgacaaaaaacaaagcgataatacgatcgtcgacagctttaaaacagtcgaaaaaaatgtaggcgctttttctgaagacagcatcagccccacatttacgggagcaaatacagaacgaaaaggttttacgcatctgaaaggaaaacaaattacggaaaaagaagcggtcaaaatcgcgcaacggtttgcgcctgatcataattattcaattaaagtggtcaaaagcggcaggaagacgaatcgggacgtatacagcatccgcatgaaagacgccgacaacaagtcttttatctatatggatattacccaaaaaggcggacatccggtctatttgattcaaaaacgggccgtgaagaaacaaaagatcagcctcaatgaagcatctaaccgggccgtcgcgtttttaaagaaaaatggatatgaaacaaaaggcctcgaaattgatgaaagcgcgcaatataataacatcggcgtcttttcttttatccccgtggagaaaaatgtccgcatttatccggaagccatccgaatgaaagtggcgctggatgatggtgaagtcgtcggtttttccgcgcgtgattacctggcggcgcaccgcacgagaacgattccggctcccgctttgtcagctgatgaagcgaaagcgaagctgaataaaaatgttgaagtgcgggagacccggcaggcgctgatcacgaatgagctcggtcaggaagtgctttgctacgaaatgctcgggacgatcgggaaagacacatatcaaatgttcattaatgcggacgacggaaaagaggaaaaaatagaaaagttaaaaagtgcagaacctatatataaagacctataaaaataaaggaggaaaggactaaaagtcttttcctttttttcgttacatgctttaataaaagcataaataatgaaagagtgaaggcccatgatagctgtcggagattatatttggattgaatacatagagaacaatgagcccaaaaaagcgaggagcaaagcagtaagcgttgaaaacggcgaactgcacatctcatatcccgtcgatctggattcgggacggacggtctttttgcataaaggattggaaataacagcggaatttatggggaatggccacgtaccgtatcaatttaaaagcataatcaaaggaaagaaaaaagaccccatcccgatgatcggattggacatcccccctcaggaggaaatgaagcggattcaaagacgccgatacgtccgtgcagacgcagtattggatgtatccgtcaaaatggaagcgaaaaaaaccgctttccatacggtttcctctaatatcagcgccggcggaatcgctgttgtgatgcctgagcatatttccgcggaaccaggtgaaaagctgtatgtctcattttctcttcccggcaaggaaaatacagccgatattacggccgaggctgttacccagcggattttttatgatgaaaaggcggataaacaaaaaatgacgcttgaatttgcagaaatcgatcccgcttcacagcagcttttactccaatattgtatgcgcgcgcagctgcagcagagaagaaacagtctgtcggaataaacagcagcgcacttttccatactaatcctaatggaggtgcgcgtgtatgaaaacgtttgaacgtctgctggtcaaattggtctgcattcagcttatcattttgggcgcggtgcaatttttgcttcattatcagcctattgaaccttatatttcgaaagctgtgaaatatgagggagttgataaaatggagaaaaaagaatggattgaaacggtaaagcggtaaatcagctcaattttttcgccccttttccggcagttcatgatacaatccatagaggagaaaagagcaaggagagagattatggacaagaaattatcaattgcgatcgacgggccggccgctgccggaaaaagcaccgttgctaaaatagtggctgagaaaaaatcatatgtgtacattgatacaggagcgatgtatcgtgccattacatatacggcgctcaagcagaatgccgatttaactgatgaagccgcgcttacagagctgctgaagcgtacggaaattgagcttgtatccgctccggaaggacaaatcgttctggtaaacggagaagatgtgacagaagaaatccgaaaagacgaagtcagcaaccaagtatcaatcgccgccaagcataaaggcgtcagagaagaaatggtcaaaagacagcagcagctcggacaaaaaggcggtgtcgtcatggacggccgtgatatcggtactcacgtgctgcctgatgccgaagtgaaaatttttctgctcgcgtccgtagaggaaagagcgaagcgccgatatgaagagaataagaaaaaaggctatgacgtgaattacgagacgctcattgaagaaattgccagacgcgacaaactcgattcagagagggaagtttccccgctgcgcaaagcggaagacgcgattgaaatcgatacgacgtcactcagcattgccgaagtcgcaggaaaaattctggagatcgtcgaacagaaatcacgttaacttcgggtggagcgctttataatttttttcgaagacaagatgttattgcttgacaaaccagtccatttattagaagttaatactaataaaactttttattgatcattcaaaatcttttttggatgattctttaatacatattcggctgaaaagcggacattcacatgttcagctttcaaaccgtattaattaagctgtgtaggtttggaccaaggaggttattcaaatgacagaggaaatgaatcaaattgatgttcaagtgccagaggttggagatgtagtaaaagggattgtgacaaaggtagaggacaagcatgtagatgtcgaaattgtcaatgtcaaacagtccggaatcattccaatcagtgaattatcaagtcttcatgtagagaaagcatcggatgtcgtaaaagttgacgacgagcttgacctgaaagtaacaaaagtggaagacgatgctttgattttatctaaacgtgccgttgatgctgaccgcgcttgggaagaccttgaaaaaaaattcgacacaaaagaagtgtttgaagctgaagtgaaagatgtggtgaaaggcggtctcgtcgttgatatcggcgttcgcggcttcattcccgcatcacttgtcgaagctcatttcgtcgaggatttcactgactataaagggaaaaccctctctcttatcgtcgttgaactcgaccgtgataaaaaccgggtgattctgtcacaccgggctgtagtggaaaaagaacagacagccaaaaagcatgattttctccaaacgcttgaggttggaagcgtgcttgaaggaaaagtgcagcgtctgactgatttcggcgcatttgtcgacatcggcggaattgacgggcttgttcatatttcgcagctgtctcattcacacgtcgaaaaaccgtctgacgtggtggaagaaggtcaggacgtaaaagtgaaagtactgtccgtagaccgcgataacgaacgtatttctttatctattaaagaaacgctgccgggaccttggagccagatcggcgaaaaggtaaaacagggagatgtgcttgaaggaaaagtgcagcgccttgtaagcttcggcgccttcgttgaaattcttccgggcgtggaaggacttgtgcacatttcgcaaatttccaataaacatatcggaacgccgcatgaagtgcttgaagaaggacagactgttaaagtgaaagtgcttgacgtgaacgaaagcgaagagcgcatttccttaagcatgcgtgagcttgaagaagcgccgaaagccgatcaggaggacttccgccaataccaggcgaaagaagagccgagcaccggcttccagcttggcgatttaatcggagacaagcttaataaattaaaataaattggtgataaaacgtgacacgagcagaacgaaaaagagaacatataaatcatgcgctgtctaccggccaaaaccgggaaacggggcttgatgatattacgtttgttcatgtcagcctaccgaacctagcattggaaaaagtggatatatcaacgaaaatcggcggactcacaagcagttcgccgatttttatcaatgcgatgacaggcggcggcggacaacttacatacgaaattaacagatcgctggcaagagccgcgcgcaaagccggcatgccgctggctgtcggttcgcaaatgtcagctttaaaagatccctccgaacggtgttcttacgagatcgtcagaaaagagaatccggatgggctggtatttgccaatttaggcagcgaggcggatgccgagcaggcgaaaagggcagttgatatgattcaagcagatgccctccagattcatttaaatgtgattcaggagatcgtcatgccagagggtgacagaagctttactggcgctctcggccgtattgagcggattgcggcggaagcgggagttcccgtttttgtcaaagaagtcggcttcggaatgagcagggaatcggcacggcagttatttgatgctggcgcagcagcagttgatgccggcggatacggaggtacgaatttctctaagattgaaaatatgcgcagagagaaggcgcttcatttttttaatacgtggggaatttccactgccgcaagcttagcggaaatccactcgctctccgctgatcaatcaattatcgcatccggcgggctgcaaagcgccctggatgtcgccaaatcgattgccctcggcgcttccggcgcgggaatggcgggcactttcctgaaagctctcacctctaaaggagaagagggcctgtttgacgagatgacggcgcttttacaagagctgaaaatgattatgaccgccctcggatgccaatcggtttcccaattgcaaaaggcgcctttggtcataaaaggtgagacacatcactggctttctgaacgggggattgacacgtcccgtttcagcagacgttaaaaggcatgcgaacccgcatgcctttttctgttttttacgattttctttttcggaattccccgttttgctcaaggcttgtcgctcctttatggtgaatcgaatcatcgcgatcagattccacccgtcgggaggctttcagttttttctcctgtctgtcttttcccatccttatccgctcctttcagtcataattggtttaaaaaatgcgttcccgctccatactggtcagaggaggagcgattatggaaccgttttattattactggtcaatgtggtttttatggatacttgcgacttttatttttgccaaaacaaaaagccgcttttacgtatcagtctttattttgactaatatgatggcaagcatacatcagattacggcttattttacgctgaacgcggcatatgtcatgttttttgctgcggcatttgtttatgcgggaagcctcggcatgcataaacggctccgtaatattgtgattcatctgacggcggctgcggcgtacggctttatttttctttttgcattatatgaccctgtttggtttatcataaaacctgaatgggcggcggttatactgcttaccgttattacgctttccgttgaggggcggttccctgagaggctttgtctttttgttctcggcatgtgccagggggagctattgtatgctgcggtcatccgcaacattgcgggtgcagcagccgtcggtgattataaatggctttcaggctgttcggcgggagtgattcttctcgtcgggctgactacatatgaacagcttgcggcgcgcatcagccaaaaaagcaaaaagcagggcaaaggagcgacaaaaatgtcttgaaaacagacggagactgttacatgaatgcgaaacattttgaagaatacattgtgatctcagtgaaaactgatataataaatgagttaagcccttctgtttgaagggttcttttcatagcgaagatgatttttaataaccggttgaacaattttttgtgaaaatgtaagcggctggattgaaaggaagggtactatgggtaaacctgtcgtagccattgtcggaagaccgaatgtgggaaaatccacaatctttaaccggattgcgggtgaaagaatttcaatagtagaagatacccccggagtgacgcgggaccggatatacagttcggcggaatggctgaattatgattttaacctgattgatacgggcggaattgatatcggagacgaaccgtttctgacacagatccgccagcaggctgaaatcgccatggacgaggctgatgtgatcatctttatggtgaacggccgtgaaggtgtgacgtctgcggatgaagaagtggcaaaaatactgtaccggacgaaaaaaccggtcgtattagccgtaaataaattagataataccgaaatgagagcgaacatctatgacttttatgcgctcggctttggagaaccgtatccgatttcgggcacacacggtttaggattgggagatttgctcgatgcttgtgccgagcattttaaaaacattccggagacgaagtacagtgatgatgtcgttcaattctgcctgatcggccgcccgaatgtcggaaaatcatcccttgtcaatgcgatgctcggcgaagagcgggttatcgtgagcaacgtagccggaacgactagagacgctgtggatacggcgttcacctacaatcagcaggaatttgtaatcgttgacacggcgggaatgagaaaaaagggtaaagtatatgaaacaacagaaaaatacagtgtgcttcgggcgttaaaagccattgaccgctcagacgtcgtcggcgttgtgctgaatgcagaagaaggcatccttgagcaggacaagcggatcgccggatacgcccatgaagccgggaaagccgtcgtcattatcgtaaacaaatgggatgccgttgataaggacgagcgcacgatgaaagaatttgaacagaatattcgggagcatttccaatttctcgattatgcgccggtgctgtttatgtcggcactgacgacaaagcggattcatacactcatgcctgcgattattaaagcgagtgaaaaccactctctccgcgtgcagacaaatgtcttaaatgatgtcatcatggatgcggtcgccatgaatccgactccgacgcacaacggctcccgtctgaaaatttactatgcgactcaagtcgctgttaagccgccgagcttcgttgtttttgtcaacgatccggaactgatgcatttttcttatgaacgctttttagaaaaccgaatccgggacgctttcggatttgaaggtacgccaattaaaatatttgcaagagcaagaaaataaaaaggtgtgatacagagatgaaaaaagtggcaatgcttggagcgggaagctggggcactgcactttctttagtgctggctgataacggacatcaagtcatgatgtggggacaccgtgccgaattgatcgatcaaatcaacgaactgcatgaaaacaaagattacctgccgggggtggagctatcaagttctatcatcggtacagctgatttaagcgaggctttaaaaggagctgacttcatcattgtggcagttccgacaaaagccattcgggaagtgctgaaaaaggctctgccgtacatcccgaaacaatcgatttttgttcatgtcagcaagggaattgagccggattcgcttctccgcatttcagaattaatggaagaggagctgcctgaggagtacagaaaagacatcgtcgtgctttcagggccgagccacgctgaggaagtcggattaagacacccgacgactgttacatcatcttcaaaaaatatcaaggctgcagaagcggttcaggatttatttatgaaccagcatttccgcgtctataccaatccggatatgatcggtgttgaaatagggggagcgttaaagaatatcatcgctcttgcagcggggattacagacggattgggatacggagataatgcaaaagcggccttaatcacccgaggtcttgctgaaatcgccagactcggcacaaagatgggcggaaatccgctcaccttttccggcctgaccggcgtaggcgatttaatcgtgacgtgtacaagcgttcattcccgaaactggcgcgccggcaacctgctcggcaaaggatacaagctggaagctgtcctggataagatggggatggttgttgaaggcgtgcggacgacgaaagctgcgtatcagctgtctcaaaaataccaagtgaaaatgccgatcacagaggcgcttcaccaagtattatttaacgggcagaaggtagaaacggccgtagaatccttaatggccagagtgaaaacccatgagatggaagacttggtcaacacattcgaaaaccgggtgaagtgacaataacatgccgtcagcatattctgaagtgacgaaagtccaaaacgcagaactctccggctgaaatcgcttaaaacatttgctgatttaggcagaagaggatgcagacgtatgcatctgcgcatactatagcatcgaagtccaagagagtgtatctcagacgtacaggtgaatatagtcaacttgactgaagcaaagtccccctctttgcttcagtttttttgttttttcaatagatggaaaacctgttgatcttttcaacatttgtatattaaaatgaaatataacgcttacaatgatgggacggggggcacgaacgtgagtgtggcattgatgaaaatgtggtttgcgcttggtgcgatgggattaatgtttgttgcggtggcctctatttatgtcagcaggtacaaagtgaaaaacaaactgataaaagcagcggtttcttcactcgcttatgcctgcatggtcatctcgggattgatcgtgttaatggtcgttttcagcgggcctgtcaatgaataaagcaaaaagggggcgcggaatgcataagttaaaaatggccgtcataacggcaatggcggtgcttctgctgtccggctgtctgtaccctgaagcggaaaaaactgaaaataaagtatcttacaaacatcagcttcagcaggtgcaagcggcagtggatgaatttaaaaaggcgaacggcggacttctgccgattcagacaaaagatatgaaaacaccgctctatcaaaaatatccgatagattttaagcggctcgcgcccagatacatagaggagccgccggcctcagcttatgaaagcggaggaatgtaccaatacgtgcttgtcgatgtggaaaataggccgaccgtcaagctggtcgatctccaaatggcggaagcaatccgcgacatgaagctgcgtgtcaaaatgtatcaggaaaagcatacatatcctccctatgaggacgccgtttcaaaagggctgttcactttaaataaaaaaaagctcggcatgaaagactctccttcagtcaaaagtccggtttcaggcacgtctctgccgcttttaatcggcgctgacggagaaatctatgccgactatcgcgtcgatctcgcccgctgcctgaaggaaaacaaaaagaaaatcaaaccgggcgcggaaattcaggatattttatggaaagagactcctttcgtcccggccttttcagtcacatacaccgtaaatgaaaaacaggaacccgtttttttagaaagtcaaacgaaacaggaatgaacctttttcccgcgcatacaaatagggagaaaggttttcttgattttgatagaaaagactgcctgaaaattttctaaagatgtcatattgaaataggacaacgtcatacacatatagtgtcctgtatttgattggagaatggtgaatgaaaaatgataaggataggaagtccgggaggggatcacttggaaaaggtcgatattttcaaggatatcgctgaacgaacagggggcgatatatacttaggagtcgttggcgctgtccgtacagggaaatctacattcattaaaaaatttatggagctcgtggtgctcccgaatatcagcaatgaggccgatcgagcgcgggcgcaggatgagcttccgcaaagcgcagcaggaaaaacgataatgaccacagaaccaaaatttgtcccgaatcaagccatgtccgttcatgtcgcggaaggacttgatgtcaacatccgtcttgtggattgtgtgggatatacggttcccggggcgaagggatatgaggatgaaaacggcccgagaatgatcaatacaccttggtacgaagaaccgattccctttcatgaggcagcggaaatcggtacgagaaaagtcatccaggaacactccacaatcggggtcgtcattacgacagacggctcaatcggcgatattgcgcggggcgattacgtggaagcggaagaaagagtcatcgacgagctgaaggaagtcggcaaaccgtttattatggtcatcaactcggtaaaaccgtaccacccggaaacagaagcgctcagagctgaattaagcgcgaaatatgatattcccgtcctcgccatgagtgttgaaagcatgcgggaaacagatgtgttaagcgtcctcagagaagcgctttacgagttccctgtgctggaagtcaatgtcaaccttccgagctgggtcatggtgctgaaagaaaatcactggctcagagagagctaccaggaatcagtgaaagaaaccgtaaaagatattaaacgcctgcgcgatgtcgaccgggttgtcggccacttcagtgaatttgagtttattgaaagcgccggattggccggaatcgaacttggccagggtgtcgcagaaattgatttgtatgcgccggatcatttatatgaccagattttaaaagaagtggtcggcgttgaaatccgcgggaaagaccacctgcttgaattaatgcaggacttcgcccacgcgaaaaaagaatatgatcaggtatcagatgcgctgaaaatggtgaaacagaccggctacggcattgccgccccggccttagccgatatgagccttgatgaaccggaaatcatcagacagggatcaagattcggagtaaggctcaaagcggtcgctccgtccattcatatgatcaaagtggatgtggaaagtgaattcgcgccgatcatcgggacggaaaaacaaagtgaagaacttgtccgttacttaatgcaggactttgaagatgatccgctttctatctggaactccgatattttcggcagatcattgagctctatcgtaagagaaggaatctccgcaaaactgtcactcatgccggaaaatgcgagatataaactgaaagaaacgctggagagaattattaacgaaggctcaggcggcctgatcgccattattttgtaagctgaaggacctcttcctgaaacggggggtctttttttattctttttagatactggaaatcaatcaaggattaggaggaaaaaagcaaaaaaaggaatatttgttcggtgaaacacgtgaaaaccttgacgagcaagggattgaggctttaaaatgcttgatatggctttttatatgtgttactctacatacagaaaatcttcactttgttggacaaacattcctcaaagtgtctgttttcttttgaaaagccgtttacttgtctgttcttccctgctttgattttttatcagacaggtttagaatcaggctgaactgtgaagaaatgataataaactgctgatttgatacccttttgggaggaggtgaaaggcatgaacaagacagaactaatcaatgcggttgctgaagcaagcgaattgtctaaaaaagacgctacaaaagcagttgattctgtttttgatacgattttagatgcacttaaaaacggtgataaaatccaactgatcggtttcggtaactttgaggtgcgcgagcgttctgcacgtaaaggacgtaacccgcaaacaggtgaagaaatcgaaatccctgcaagcaaggtacctgctttcaaaccaggtaaagctcttaaagacgctgttgcaggaaaataattgtgaatatagatcgtgtatgcatctgatacatacactttgtttcttcacagaaaagccccttgataaaggggcttttcatatttaagcagcctcggtcaccgggcaggactttcgttttgcttttggcgcggcaaatgtgctagaatcgaaattaaatgtattcaatggtggaggacacagacaatgaaagaagttaataaagaacagattgaacaggcggttcgccagattttagaggcgattggagaagacccggaccgggaagggcttttagatacgccgaaacgcgtggcaaaaatgtacgcggaagtattctcgggattaaatgaagacccgaaagaacactttaaaaccgttttcggagaagaccatgaggagcttgttcttgtaaaagatatcgcgtttcattccatgtgtgaacatcaccttgttcctttttacggaaaagcgcatattgcctacattccgcgcggcggcaaagtgacaggcctgagtaaattggcgcgggcggtggaagccgtctcaaaacgcccgcagctgcaggagcgcatcacttcaacgattgcagaaagcatcgtagagaccttagatccccacggcgtcatggttgtcgtcgaagctgagcatatgtgcatgacgatgaggggcgtaagaaagccgggtgcaaaaacagtgacttccgctgtaagaggtatttttaaagatgacgcagcggcgcgttccgaagtgttagaacatattaaacgtgcggattaataatgatagagggtgcagatatgaattcaaagcattcaagtgattttgtcgtcattaaagcggtcgaggacggcgtgaacgtcatcggtttaacgagaggaacggatacgaaatttcaccattccgaaaaactggacaaaggcgaagtgattatcgctcagtttactgagcatacctctgccatcaaagtgagaggcaacgccctcatccagaccgcttacggagaaatgaagagcgaaaaaaaataagccggctgtttcccgcttttgccaaatgcccgcaaacggcgggagaatacagccaatttcttttttttatgctataatgatacctgcgtataataatgacgagtaaatctcatacatattagaataaatgtgaatttggggacaagggtgatatttttgcaagacatctacggaactttagcgaatctaaatacgaaattaaaacaaaagctgtctcatccttatttagcgaaacatatttctgcgcctaaaatcgatgaggataagcttcttctttttcacgctttgtttgaagaggcggacattaagaacaacgacagagaaaattacatagtaactgcgatgcttgtccaaagcgcccttgatacccacgatgaagtgacaacagccagagcgttaaagcgagacgaaaataaaaaccggcagctcaccgtgcttgccggcgactatttcagcggactgtattattcgcttttatctgaaatgaaggatatctatatgattcggacgctcgctacggcaattaaagaaatcaatgagcataaaatccgtctgtacgatcggtctgtcaatgacttgaatcaattgatcgaaagcatggcgattgtggaagcggccctgtttcacagagtgtcagaccactttaatcttccgcgctggaaagagctggcgagtgatttttttgtatataagcggctgatgaacggcaatgctatatttctcgatgtcatcggcaatattgtaaagtcaggaaaatcaaaggctgacataatggaagatagcttccgaaaggcaaagcaaagcattgaaacgctgctgccgctcaattcaccaatccaaaacctaatgctgaaccggcttaaagcgatcagccaggacaaaacatatcatcagaaagtggaagaagggtaatcaacatgcaggagtcaaaagaacagcgcgtacacggcgtgtttgaaaaaatctataaaaattatgaccaaatgaactctgttatcagttttcagcagcataaaaaatggcgcgataaaacgatgcagatcatgaatgtaaaagaaggcgcaaaagcgcttgatgtctgctgcggaactgctgactggacgattgccctcgcagaagcggccggaaaaagcggcgaaatcaaaggactggatttcagcaaaaatatgctgagcatcggtgagaaaaaagtgaaagagggcggttacagccaaattgagcttttgcacggaaatgcgatggagcttcctttcgctgatgattcttttgattttgtcaccatcggcttcgggctgcggaacgttcccgactatctgaccgtgctgaaagaaatgcggcgggtcgtcaaaccgggcggacaggtcgtatgtctggaaacatcccagccggaaatgttcggattcagacaggcatattttctttattttaaatacatcatgcctttcttcggaaaaatgtttgcgaagagctataaagaatattcttggcttcaagaatcggcaagagaatttcccggtatgaaagaacttgcccgtctgtttgaagaagcgggcctgacgaatgtcaaataccattcgtttaccggcggagtggctgctacgcatatcggttggaaatgatgaatatacagatgtttgggtgaatgatatgaaatttaaaatggcctattcttttttaaatgacgatattgatgtgatcgaaagggagcttgagcaaacggtgcggtcagactatcccttgctgagtgaagccgggctccacctgctccaggcgggcggcaagcggatccgccctgttttcgtattgctttccggcatgttcggcgactatgacattaataaaataaaatatgttgcggtgacgctggaaatgattcatatggcgtccctcgtgcatgacgacgtcattgatgacgccgagctgcggaggggaaaaccgaccatcaaagccaagtgggacaaccgcatcgccatgtataccggtgattatatgcttgcgggctcacttgagatgatgacgagattggatgagccgaaagcccaccggatcctgtccaaaaccatcgtagaagtatgcctcggagaaattgaacagatcagagataaatacaatatggagcaaaacctcagaacctatttgcgccgcattaaacggaaaacggctcttctcattgccgtcagctgccagctcggcgccatcgcttcgggagctgatgagaagattcacaaagcattatattggttcggttattacgtgggcatgtcctatcagattattgacgacattcttgatttcacctcaacggaagaggaactgggaaaaccggtcggaggggatctgctgcaaggaaatgtcactctgcccgttttgtacgcgctccgtcagcctgaattgaaaaatcagctgaaattaattaacagtgaaacaacacaggagcagctcgcccccattattgaaaatattaaacgcacagacgcgattgaaaaatcaatggccgtcagtgacaggtacttaaaaaaagcgtttgaaaaactgaatacactgccgagaggacgtgcgcgctcatcattggccgccatcgccaaatatatcggcaaacggaaattttaaattcctttttacgaacaagatgtgaacattctccgccctggattgattaattgtcagaaagatgttacgatttcggtgtgcaacttgaaagcctatacataatgatggggtggagaatcttatggaaaaaacttttatcatggtaaaaccggacggcgtacagcgccagctgatcggagagattttatccagatttgagcgtaagggcttacaattggcaggagccaagctaatgcaagtttcagaacagatggctgaaacccattatgctgaacataaagggaagccgtttttcggcgagcttgtggaattcattacatcaggacccgtatttgcaatggtatgggaaggggaaaatgtagtagagatcacaagacagctgatcggaaaaacgaacccgaaagatgcactgccgggcacaatccgcggtgactacggcatgtttgtcggcaaaaatatcattcacggttcagactccttagaaagcgctgagcgggaaattcacattttctttaaacaggaagagcttgtaccgtatcaaaaattaatggccgactgggtgtactaagccgtcagcctttctttttctcgcattatgaaaaggtttacatcatttatgaaagacagaggctgcgctgccctgtcttttcgtttctcacaaatcagcccgcgggctgatttttttattgaaatcgtacaatttcgacagaaaacaggctatactaggacaaaagacagcgagattgggagagaagcaatggagccttacgacatttttatcaccaagtggaaacaaataaccggcgttgatttatctttatacaaagaagcacagatgaaaaggcggctgacgtccctttatgaaaagaaggggttcagagattttcaggaatttgccgccgctttggaaaaggacaagcttttattaaacgaaacattggacagaatgacgatcaatgtttctgaattttaccgaaattataaacggtgggaagttcttgaaacctcaattctcccattaataaagcataacaaaccgttaaaaatatggagtgcggcctgttcaacgggagaggagccctatactttggcgatgattctcaatcagcagacgggactggccggatttgatatattggcgacagatattgatgaaaaggcgctaagcaaagccaagcggggcatctatcaggaacgctcgctgcaagaggtgccggcttccgtgaaaagccgttatttcactaagcaggctgacaacagttatcaagtaaaacaagagattcagaaaaacatccggtttaagcggcacaacctgcttgccgacagctatgaacaggattttgatctgatcgtctgccgcaacgtctttatttattttactgaaaaagcaaaagaagagctgtatgtgaaaatggcgggcagtctgaaaaagaacggaattctgtttgtcggcagtacagaacaaattttcagcccggaaaaattcggccttgagagcactgatacatttttttatcaaaaaagatagaagacatttaatgaaaacttgtggtatagttttacttaaaagcgttaatgcgatgaagggagaagaaagaaatgagatacttaacagccggagaatcacacggtccgcagctgacgacaattatagaaggtgtgcctgcggggctttatataactgaagaagacattaattttgagcttgccagacgtcaaaaagggcacggccgcggacgccgcatgcagattgaaacggacagagcgaagatcacaagcggcgtgcggcatgcccggacactcggttcaccgatcgcgctcgttgtagaaaataaagactggacccactggacaaaaattatgggcgccgcaccgattacagaagaagaagaaagtgaaatgaaacgccagatttcaagaccgagaccgggacacgcagatttgaacggtgctattaagtataatcaccgtgatatgagaaatgtgttagaacgatcttccgcgcgtgagacaacggttcgcgtggctgccggagccgtcgctaaaaagattttagctgagcttggcattaaagtcgccggacatgtcctgcaaatcggcagtgtaaaagcagagaaaaccgattacacatccattgaggatctcaaacgggtaacggaagaatcaccggtcagatgctacgatgaagaagcaggccgtcaaatgatggcagccattgatgaagcgaaggcaaacggcgactcgatcggcggaatcgttgaagtgatcgtcgaaggtatgccggtcggtgtcggaagctatgtccactatgaccgtaagctggacagcaagctcgctgctgccgttctgtcgattaacgcgtttaaaggcgtagagttcggcatcggttttgaagcggccggcaaaaacggcagtgaagttcatgatgaaatcgtatgggatgaagagaaaggctatacacgcgccacaaacaggctcggaggattagaaggcggtatgacgacgggaatgccgattgtcgtccgcggcgttatgaaaccgatccctactttgtacaagccgctgaaaagcgtcgacattgaaacgaaagaaccgtttacagcgagcattgaacgttcagacagctgcgcggttccggcagcaagtgtagtggctgaagcagcagtggcctgggaaatcgcaaatgccgtcgtagaacaattcgggcttgaccagatcgaccgaattaaagaaaatgttgaaaacatgaaaaaattatcgagggaattctgatgaaagagcttgaggttcggacagcttcctccgcatatcccgtgtatatcggtgaaggtataaggaaacaggccgctgcccttttgtcttcactgaacaggccgctgacaaagatccttctcatcatcgatgctgaagttgaccggctttacggtgatgagatgttccggcttttaaacgaaacatggcccgtgaaaaaagtgatcgttccaagcggagaagaagcgaaatctctaaaagagtatgaacggattcaaacgaaagcgatcgctttccatatggaccgctcctcatgtatgatcgccttcggaggcggcgtgacgggtgatttggccggcttttgcgcagcaacttttatgcgcggaattgatttcattcaaatgccgacaacactgcttgcccatgacagcgcggtcggcggcaaggtggccgtcaaccataaactcggaaagaacttaatcggtgcgttttatcagccgaaagcggtgatttacgatacggagcttctgaaaaccctgccggaacaagagctgagatcgggcatggctgaagtcatcaaacacgcgtttatcgccgattatgcttttttagaaaaacttctcacgtttgacacgttgcaaggactgacaagcgctgagctgaatgaaatgatttataaaggaatttcaatcaaatcggccgtcgtgcgtgaggacgaaaaggaagaggggataagagcttttctgaatttcggccatacgctcggccatgccgttgaggcggaatacggctacggacggattacacatggagatgcggtcgccctcggcatgcagtttgccctttacgtgagtgaacaggttgcgggttgcaagatgaacaggaaagaactcacacaatggctgattgggctcggctacccgggaagcatcagacaagatattgaaacgccggttctctccgcccggatgatgaatgataaaaaaacgcgcggaggcatgacacagttcatcgtgttaaaggaattaggcgaagcgcgggactgcatgctttcaaaagatgagctcgaaaatttgctgaacaaatggcgaatggaggaaacagcatgatgatacgcggcattcgcggagcaacaacggtggaacaagacaccgaacaagaaattttagaaaaaacacagcagctgcttgaaaaaatcattgaacaaaatggatgcaagccggaagacgttgtacagatcctattatccgccacgcctgatatccattccgtatttccggcaaaagcggtccgccgcctttccgggtggcagtacgtcccggtgacgtgcatgcaggaaatggatgtcaccggcgctctgcaaaagtgtatccgtgtcctgatgacggttcagacggatacgcctcaggatgaaatcaagcatgtctatttagaaaaagccgttgtgttaaggccggatttatcattgacaaaaaatactgacatgtaatacgataaacaaagcttagaaatacacaagagtgtgtatagagctggtaagtaagacattgaacagttgagtttagaatagggtagcagagaatgagtttagctgagctgagataaacacgtttttattctgcccaaaagaagcctttcttttgggtttatttcttatacgcaagactcctctcactcttcatctcattctccttaccgtaaggaggagaatcatgaatttacaatcggatgtttctttatttttaaaggacagtctgacacaccgcaccattccaatcgcagagacttttacggtcgacacgatcacacccattcagatggttgaaaaactggacagaaacattacgtatcttttagaaagcaaggatgagtcgtcaagctggtcgagatactcttttatcggccttgatccttttatcacgattaaagagagtcataacacattcactgccgctgatccaaatgggcatacgctgtttgaagccggagaattaaaagccgtgcttgactggatgaatgagagcttccgcattaaaacacccgagcttgatatcccattttcgggaggggcggtcggttatctgagctatgacatgattcctttgattgagccttccgtgccaagccacgcgaaagtaacagatttcgaaaaatgtatgctgtttgtctgccggaaaatcatcgcgtacgaccacgaaacgaaacaagtgcatttcattcaatatgcggcgcttaacggccgggagacggaggaagaaaagcgggccgtttttaaagaaaattgcgcggagcttcgtaagcttatcggtattttgacagaatcgaaagatatgaaagagccgtttttttctaaagaaacgtttgacacgccaagttttgccgctgtgacatccaattatacgaaagaagagtttatggccggcgtcaataaactgaaagaatatataaaagcgggagacatttttcaaggggtgctttcgcaaaagtttgacattccggtatccaaacattcatttgagctgtacagggtgctccgcatcgtcaatccttcaccttatatgtactatatcaaactgcctgacagagacattgtcgggagttcgcctgaacgtctgatccgcgtgcatgacaggcacctggaaattcatccgattgccggaacgagaagaaggggcgccggaaaagaagaggatgaacgcctgaaaaaagagctgatgaatgacgaaaaagaaaaagctgaacattacatgctcgtcgatcttgcgcgcaatgacatcggcagagttgcggagtacggttccgtagccgttccggaattcacaaaggtcgtttctttttcacatgtgatgcacatcatctctgttgtaaccggccgtttaaaacagggcgtccatcccgttgacgcgctgatgtccgcattcccggcaggaacactcacgggcgctccgaaaatccgcgcgatgcagcttttaaatgaattagaaccgacttccagagaaacctacggcggatgtatcgcttatatcggatttgacgggtcgattgattcgtgtattaccatccgcaccatgagtgtcaaaaacggtacggcgtcggtgcaggcgggcgcgggaatagtcgccgattccgtcccggaagccgaatatgaagaaagctgtaacaaagcgggggcgcttttaaaaacgattcaaatcgcagaagacatcttttctggcggggaggagaagacggatgaacaaatttctgcaatcgtgcgttaatggccgtacgctgaaaactggagaagccgaaaagctgatggagatgatgatgaacggggacatgtcgcagtctgagatcggcgggattttatcggtattagcccaccgaggtgaaacggcggaggagcttgccggatttgtaaaagtgatgcgggcgcgggcacagacatcaggtggcttggcggatgtcgttgatacgtgcggaacaggcggagacgggatttctacgtttaacatatccacggcagcggcgattacagcttctgctgccggagctaaagttgccaagcacggaaatcgctccgtttcgtctaaaagcggcagcgcggatgtgctggaaaaactgggggttcccattcaagccactccagaaagcgttaaacgcagcattgaaatgaaacaaatggggtttttgtttgcgccgctgtttcattcgtcaatgaagcacgtcgccgccgcaagaaaagagcttggcttccgaaccgtatttaatctgctgggcccgctcagcaacccgctgcaggtgaagcggcaggtgatcggcgtctattcatttgataaagcgcgcttgatggcaagcgctctggaacaatttgatgtcagacacgtcatgcttgtgtcggcccgtgacggattagatgaattgtccctctcagcaccgaccgatatcattgaactgaaaaacggtgaacgtctggaatattccgtttcacctgaacaattcggttttacagaaggttcactaaaggatattcaagtgagttcatcggaagaaagcgcgctcctcattcagaatatttttgcaaataaagctccgtcatccgctctgcatattaccgccttaaatgcgggcgcggccatttatacggcaggtcttgcaaacgatctgaaagaaggaacgaaaaccgccttagaagcgattcaaaacggagatgccaaaaggcagctcgaacgtctgaaacagaaagaggaagaaatgtatgcttgatcaaatcattcagcagaaaaaagaagaaatcaaatccatcgtgctgccggaaacctgtcaaattgaacggagatcctttaaaaaagcgctcctggacccgaaccgttttatcgggctgattgccgaagtgaaaaaagcttcgccgtctaaaggattgattaaagagcattttgttccggaaacgattgcggcggattatgaagcggctaaagccgacgccctttcagttctcacggatacccgtttttttcaggggagaaatcaatttctgacagatgttaaacaaaccgtgtctcttcccgtgctgagaaaagattttattattgattcccttcaggtggaggaatcgttcaggatcggcgccgatgccattttgctgatcggggaagcgctggaaccttcagagcttcatgagctttatctggaagccagcgagaagggcatggacgttctcgttgaagtccatgatgaaactgtgcttgaacggattttacaagtgtttcagccggacattctcggcataaacaaccgggacttaaaaacgttccgtacttctgtttcgcaaacggaaaaaatagcgcagcttgtgccggacggctgcctgctggtcagcgaaagcggcatcggttctttggctgacctgcaattcgtcaacaagcacggggcgcaggctgtattggtcggagaatccttaatgagagaggattcgcagcaaaaggcgatccgcggactgttcggggagtgatgatatgaaaaagcctgaggtaaagtactgcgggatacgatcgaagcgtgattacgaacttgcggcagcttcaggagcggattatctgggatttatttttgccgcaagcaaacggagagtaacgccggatgaggtccggaaatggaaagagcaggtccggacagacaagaaacatgccggagtatttgtaaatgaaacgatagaaaacatcgcgcaaatcgcctctgatctggcacttgacgccatccagcttcacggtgatgaatcgcctgaggatgccctccgtctccgtccgcttgtgcgctcggagatatggaaagcgctccatcacggggaagggacgcttcgtcagatggctcaatttgcacctgctgtcgacggatatgtcattgattcttcagtaaaaggaatgagaggcggcacgggaatcgcgttttcatgggctcgtgtccccttgtaccgaaagcaggctcaaaatgcaaacaagcgctgttttatcgcgggcggcgttaatcctgaaacgattaccggcttactgagatcgcgtccgtgcggtatagatcttgccagcggaattgaaaaaaacggacaaaaggatcaaacactgatccggcttttagaagaaaggatgaaccactatgtatccatatccaaatgaaatcggaagatacggcgaattcggcggcaaatttgtccctgaaacattgatgcggccccttgaggaaatcgaaacggctttcaaagaattaaagaatgatcccgtttttcatgccgaatataaaaaactattgtttgattactccggaagaccgaccgcattaacgttcgcagacagggtgtcagagtatttgggaggggcgaaaatctatctgaaaagagaagatttaaaccataccggctctcataaaattaacaacgcgttaggccagattctgcttgccaaaaagatgggcaaaacgaaaatcatcgccgaaaccggtgcgggacagcacggtgtggctgccgcgacagccgccgcaaaattcggttttacgtgtacagtttttatgggtgaagaagacgttgcacgccagtcgctgaacgtattccggatgaaactgctcggcgcggaagtggtgccggtcacaagcggcaacggcacgctgaaagatgcgacgaatgaggcgatcaggtactgggtccagcattgtgaagatcatttctaccttatcggttctgtagtggggccgcacccgtatccgtatatcgttcgcgaatttcagaaaatcatcggcgaggaagcgaaagaacagctccgccgggttgaaggaacgctcccggacaaggttgttgcatgtgtcggcggcggaagcaatgcgatgggcatatttcaggcctttttagacgaagatattgagctgatcggcgccgaggcggcgggaaaaggaattgatacgccgctgcatgcggcaacgatcgcaaaagggacgctcggggtgattcacggttcaatgacctatttaatacaagatgaatacgggcagattatcgaaccgtattccatttcagccggccttgattacccggggatcggccctgagcacgcctatctgcataaaagcggccgtgtaacgtacgaaagcgtgacagacgatgaagcgattgccgcgttgcgtctgctttctgaaacagaaggtattcttccggctattgaatctgcccacgccctggcaaaagcgtttgaaatggcaaaagacatggataaagacaaaatcattctcgtcagtttatcgggaagaggagataaagacgttcatacgctgatgaatgttttggaaaacggggtggagacacatgtttaatctgcgagattctgaaaaattatttatcccttttattacggctggcgatccgcttcctgacatttctgttgagctggcaatatcattgcagaatgcaggcgcttctgcccttgaaatcggcgttccttacacagatccgcttgcggacggacccgtcatacaacgggcttcaaaacgggctctggaaaacggaatgaatatcgtaaaagcaattgaacttggcggcaaaatgaaaaaaaacggcgttcatattccaattatcctctttacgtattataatcctgtgttacaattagaaaaagaatactttttcgctttactgcgggaaaacgacatagacggtctgcttgtacccgaccttccattagaggaaagcgcccttttacaaatgacatgcaaaaaggagaacatcgcttatatctctctggttgcgccgacaagtgaagaccggttgaaaataattactgaacaggcctgcggctttgtgtattgtgtatcctctttaggagtgacgggcgtacgcagcgaattcgacccgtctgtatactctttcatacgtaaggtgaaagaattcagctctgttccggtggctgtcggttttggcatttcaaaccgcaaacaggttgacgggatgaatgaaatatctgacggtgtcgttgtcggcagcgcgcttgtcaaaaaagttgaagagcttaaaacaaagcttgtgaatcccggaacaagagctgatgcgcttcttgaatttgaagaatacgcaaagacgttcggacgactgtacagtgtaaaatgaggtgactggatttgcagattaaagaacagctgcggcagctgaaaccgtatcagccgggcaaaccaatagaagaagtgaaaatggaatacgggcttgagaaagtagtaaaactcgcttctaacgaaaatccgttcggctgttcacaggccgctaaagatgcgctgcatcaggagattgagcagcttgcgctgtatcccgacggttacagtgccgctttgagaacacggctcagtgagcatctgcaggtcagtgaatcttcgatcatttttggcaacggctctgatgagcttgtgcagattatctgccgttctttattaaatgatcaggcaaacacgattaccgccgccccgactttcccgcaatacagacacaatgcggtgattgaaggcgctgaggtgcgcgaggttccgctccgcagtgacggcgctcatgatttggaccggatgctggaagcaattgacggcgagacgaaaatcatatgggtatgcaaccccaataatccgacggggacatatacttctgagcaagagctaattgcctttttaaacagagttcccgagcatatactcgttgtacttgatgaagcgtactacgagtatgttacggcggaagattacccagaaagcattccgcttttaaagcaatatccgaatgttatgatcctccgcaccttctctaaagcgtacggacttgccgcgctgcgcgtcggatacggcattgcggacgaagcactgatccgccagattgaaccggcgagagagccgttcaatacgagcagaatcggtcaggcttcggcactggcagcgcttgatgaccagacatttattcaggaatgcgtcgagaaaaataaagcaggccttaagcagtattatgattttgcagaaactcacggattaacttgttatccttcacaaaccaactttgtgctcattgattttaaccgcccggcggatgaactgttccaagccctgttggaaaaaggatatatcgtccgctcaggacaggcgctcggatttccgacagcgttaaggattacggtcggtacgaaagagcagaatgaggaaattctcacaattttagctgaaatattataagaggtgatcaggcatcacctctttgctctattaaaatagttgaaaaaggaaatgagtgaaatgaaggatactatattgcttgcggggatcgggctgatcggcggatcgatcgcattggccatcaaaaaggagcatccgcataaacggattatcggtgtggatatttcggaagaacagctcactgccgcgctgaagctcggaattattgacgagcgggccggctcatttacggaaggggcgcagcaagcgtctgttgtcattatcgccacgcctgtcgcccaaacgctgaaaatgctcgatgtgctggccgcatcagacatcacccatgaactcctgattacggatgtgggcagcacgaaacagaaagtcgtcagctacgccgacaaagtgcttccggctcactatcaatttgtcggcggccatccgatggcgggatctcataaatccggggccgctgccgcgaaagaatttttattcgaaaatgcgttttatattttaacacccggaaaatcaacttctaaagagtcagtaacgcatctgaaggaactcttgaaagcggcaaacgcccactttgtggagatgacccccgaggagcatgacggcgtaacgagcgtcatcagccatttccctcatatcgttgctgcaagcctcgtacatcaggctcatcatgctgaagaagattatccgtttttgaaacgtttcgcagccggcggttttcgggacatcaccaggatcgcctcaagcagcccggcgatgtggagggacatacttcttcataacaaagataaactgcttgaccgcttcaaagaatggaaacgggagattgacacgatcgaatcttatgtagaaaatgaagatgcggacagcctgttcggatattttaaaaaagcgaaagattatcgcgacggtctgccgctccgtcaaaaaggagcgatcccgtccttttatgacctttatgtcgatgttcccgatcatccgggggtcatttcggaaattacggcgatattggcagaagaaaaaatcagtatcaccaacatccgcattatcgaaacaagagaagatattaacggaattctcagaatcagtttccagactgatgatgaccggaagcgtgcggaaacctgcattcaatcccgcgccaaatatgacacattttacgctgactgaggtggaaaacattgaaaagagaaaaagtgacgtctttaaacggtgaaattcatattccgggggataaatccatctcccaccgttctgttatgttcggagcgcttgcggaaggaaccacaacggtaaaaaactttttgcccggagccgattgtctgagcaccattgcctgcttcagaaaaatgggtgtctccattgaacaaaacggaagtgatgtaacgatatacgggaagggcattgacgcactttgtgagcctgacagccttcttgatgtcggaaattccggcacgactatccgcctgatgctcggcattttagccggacgcccatttcacagtacggtagcgggcgacgaaagtattgcaaagcgcccgatgaagagggtgacggagcctttaaaacagatgggagccgcgattgacggaagagcggacggaggatttacgcctttatccgtaagaggcggacaattgaaaggcattgattacgtctcccctgttgcaagcgcgcagatcaaatccgccgtgctgcttgccggattgcaggctgaagggacgacgaccgtcactgagcctcataaatcaagagaccatacggaacggatgctgaacgcttttggcgccgagcttgcggaaacggagacgagcgcttccgtaacgggcggtcagaagcttcagggggctgatattttcgtgcccggcgatatttcttcagcggcctttttcctcgcggcaggcgctgtcgttcccggaagccggattgtgctgaaaaacgtcggcctgaacccgacacgcacgggaatgattgatgtcttaaagcaaatgggagcttcacttgaagtgattccttcagaagcggacagcgcagagccttacggagacctggttattgaaacctcagctctgaaagcggcagaaatcggcggagaaatcattccccgtttaattgacgagatcccgattatcgcccttttggcaacgcaggctgaaggcacaactgtcattaaagacgctgcggagctgaaggtgaaggaaacgaaccggatcgacaccgtcgtatcagagctccggaaaatcggcgcagacattgaaccgactgaagacggcatgaaaatacacggcaaaaaaacgcttgcgggcggagccgatgtgtcaagccacggtgaccaccgcatcggcatgatgctcggtgtcgcttcatgcctgacagaagagccgattgacatctgtgatactgaggcaatccatgtctcatatccgacattttttgagcatttagatcaattagccaaaaaagcctgaagacgattcttcgggcttttttcttcatgtgtcataaaactttgggctttgacatagcttgtcttaaacagaaaataacagaaagggggaatgcgttttcgttacagagacagccggaacaaattgcgctgtttgcgtataaagatgccgtccccttttttgccgttttcctcttaatcattttctgataaactataatgccgggtaaagcatcttatttgcgggcaggccctgtctgaattatgataagaataacccgaataaaaacccttttcattggttgatgaggtataggaaaagaaaggaccggtctgatttgaatacattgatccaagaagccataaaattagttgaagcaggtgaaaccgaaaagggactcaaagcgctttcaaaagctgaaacgcagcttcatgacgaagacaaagccattgcagcccagctctactatgaatggggaaacgccgaaaaagcgttagcgctgatcagtgatctgcatgacctttatccggatgagtctgagctgacgaatttttacgccgaattgttaatagatattgatgaagaagaaaaagctcttgaggtgctggagacaatttctccggaagacccgtcttacgcggaaagccttcttttaatggctgatctgtatcagatgcagggcttatttgaagtaagtgagcaaaagctgttacaggcgaaagcgatgttacaagatgaacctgttattgatttcgctctgggggaattatactttactcagggatcatacgcaaaagccgttccttactatgaagagacggcaaaagaacggcacgaaatcggcggcgtaaatgttcatcagaggctggctgagtcattgagcgcggcgggtgaatttgaggaagcgatttcatggtatgaaaaagcggcggcagaacatacagaaccgaatacgattttcgggtacgggttcacagcctatcaggcgggaatggtcaaaacagccatcaagcagctgtctgatttaaaagggcttgatccttcctattcatcgctttatatgccgcttgcaaaaagctacgaggcagaaggcatgtatgaagatgcattaaaaaccgctaaagaaggtattacttacgatgaatacaataaagagctttttctctatgcggcgaaaatggcgttaaagctcggcaacgcagaagaaggcaaaaagcttcttcaggaagcgctggcgctcgatccgggttacgtggaagcgctccatacgcttttagccgtctatcataaagaagaaagctttgaagagattattgatctgattcaggaagtccgcggctacggagaagaagatccgaaatacaattggtatttggcgggtgcttatacaggccttgagcaatacgctgaagcgaaaaaaagcttcgaagctgcgtatctccattatcaggatgatcgggatttcttatatgaatacgctcacttcttattggaagagggtctccagaaagaagcgctgccgcttttaaaacaagtgctttcaatggatggaacaaacgaagagcttgaagaaacaatcttacggatagaggatgaatttttaagataagcaggattttgaaccatgcttgctgaatgtataagtgatgtcagattatacgatcgatagaggagggaattacatgcagacccctgtttctgtcaatgaaaaaaaggattttatccgttggtttttaaatcattatcagcttaaacgccgggagtgcgtctggattttaaattatttaatgagtcatgattcattaatggaaaaagtccattttgtagaacaagctgaattttgcccgcgaggcattatcatgtctactcattgcgttgatgaggtgccgtttaggttttacaaagaaaatgtcatgactacggacgcggaaaaatcttttcacgacatccggttaaataaacagcaggatttatttatccagctgaatttccgttcggcctacagctcaccggaatatgccgctgttcttgaatcaaatccgcatctgccgaaagacctgtttgaaaataaacaggatcaggggatggccgaaaaaatattagaacacgccatttccactttccagcgggaaaagctgcttaaagatatcgacgaggcgctggatcgccacgacaaagaaacatttgaaaagctttcccgccaattgaatcagctcacataaatgacagccttgcagaatatgcaaggcttgttgcgtaaagaggaggaacgagacatgagatggagggccgctgatgccgatgcctatttacaatctgcggattacattgataccgctgtcattccgttaatttccataacatcttcaggaggcttaaaagaggccgttgaacagggggaaagcacccaattgctttctgaagagcttgagcgccaattgaagggacgggtatatttattcccctcttatacatatgttgatatagaccaatcacaaatcgctctgcttcaaaaactcaaagaagaggtgatgaccaactttcggcacgccttgttcctgacggcagacgaaaaatggaaggattctgaaatagggtctgatgtcatatacatacctgccgttccgtttgaacatatgaaagactctttaaagagaaaaatagcggatgacaagtgcggagaaattttgaacgttttgttacagaagtggaacaattcttaaaaacaccaggcatcccgcaaaacacccgttttgcctctgttgaccttgctgaaagattcatatattatgagggtgtcaaatctcagaattattttctattttagttaatttttggtcaatctttagggggggaagagatgggcggaaaacaagatatatcaagaagacaatttttaaactatgcgctcaccggcgtggggggatttatggccgccagtgcgcttatgcccatggtccgttttgcgctggacccggtattaaaaccgacgggagatcaaaaaatggtgcaggttgtcagtgtggatgagctgacgaaggagccgaagcggtttgactttaaaattcatcaagtcgacgcctggtacgaatcggaagaatccaggtcagcctgggtttacaagcatggggatgaaattatagcgctttctccgatctgtaaacatttgggctgcaccgtaaactggaacaatgatcctaaaaatccgaacaagttcttttgtccctgccattacgggctgtatgaaaaagacggcacgaacgttccgggcacgccgccgctcgcgcctcttgaccgttatgagcaaaaagtaaaggatggctttttgtatcttggaaaagcaaagcctaggggggaagggtgacatgctgaacaaaatttatgactgggtggatgaacgtctcgatattacgccgatgtggcgggatatcgccgaccatgaagtgccggaacatgtaaatcccgctcaccatttctcggcttttgtctattgtttcggcggtttgacgttttttgtaaccgttatccaagtgttgtccgggatgtttttaacgatgtattatgtgccggatataaaaaacgcgtgggaatctgtgtattatttgcagaatgaagtcgctttcgggcagattgtaaggggtatgcaccattggggtgcaagtttagtcattgtgatgatgtttttacatacgctgcgggttttctttcagggagcttataaaaagcctcgggaattgaactggatcgtcggtgttctgatcttttttgtgatgctcggtctcggttttacagggtatctgctcccatgggatatgaaggcgctgtttgcgacaaaggtaggtcttcagattgcggaggcgacgccattgatcggagcgcaggtgaaaactcttcttgccggccaccacgatattgtcggcgcccaaacgctgacgagattttttgcgattcacgtattttttctccctgccgctttgtttgcgctcatgggcgcccactttgtcatgatccgcaagcagggaatttcaggaccgctttaatacaaatctgatataaaagggaggggatgacatgcaccgggggaaaggaatgaagtttgtaggagattcaaggataccggctgaaaaaaaaccgaatataccgaaagactattcagagtatcctggaaagacagaggcgttttggccgaacttcctgctgaaagaatggatggtcggggccgttttcctcgtcggatttctcgttttaacgattgtgcacgagccgcctttggaacgggtggcggacccgacggatacagggtatattccgctgccggattggtattttctatttttataccagctattaaaatatgaatatgccgcagggagctacaccgttatcggcgcgatgattataccgggtcttgccttcgggtcgctgcttttggctccgtttctcgacagggggtctgaaagaaggccgtggaagcgtccggttgcggtcggcatgatgcttttggcgctttgcgctacggtctttttaacgtggcagtcagtcgcgacgcatgactgggcgaaggcggaggagcaagggaaaatcaaaaaagaagccgccattgatactgaatcagacggttataaggtatttaaagaacaaggctgtatttcctgtcacggggataatcttcaaggcggaagcgccggtccgtccctggtcgataacgggctgagcccggaagaaattaaaaaaatcgccgttaaagggaaagggcagatgccagccggtatttttaaagggaatgacaaacagcttgatcagctggcgaagttcatttctgaaacgacagcgaaataacgtattgtgaagtagacaatagcaggatatacttttatgaaaagagctgaccggatgtcagctttttttgcatgatacatactttttacggactgagagttgatggtatgaggtggatttcttatcttttagggttgcgcggcatgcttctgcttgttcttgccgttaattttatcggtacggtgtacggctattattggtatgtgcctcagcttgcggacacgccgttccgatttctgatatttgtgcctgacagcccgacggcgacgtttttcttcctgttcgtgcttctggcatttctcatgggaagaaacgcgccgctgtttgaagcgctggctcttgtaacccttgtaaaatacgggctgtgggcggtcggaatgaatgtctttgtgctggtcaaaatggggcagatgcctttggaagggtacatgctgattgcttcacattttgccatggccgttcaaggcgttttatacagcccgtattttcggttccggttatggcatcttgccgttgccgctgtttggacgcttcataatgatgtcattgattatcttttcggcatgatgccccgctactcaatgctcaatgactatatgcaagagatcggctatgctacattctggctgagcatattttcactcggccttgcatactatttggtgatttctaaaagacggataaagcttgacttacactgatagaatcttggtctaaccttgtcccgctcctcatattctgtaaagagaaggagtgggagggacctctatgaaacgaaagctgacgatctgtcttttacttgctcttatgtgtttcatcacaactgccaaagctgaagatgagggcggtctcaaggaactgaacgacctttcggataccgttttccaaatgacgcggcgttcgcagtatgatgaggctctgcaagtgcttggctactttaagaaaaaaatgacacacgtaaactcactgagcggcgccgaagtcaggcaggtgactctgggtttcaatgatttagtgcgcgttctgaaacaggcagacgcctcagataccgaaaaaatccgggcagccgcccagttcaggttggtaatggatgcgatggaagaccactccgatccgctgtggggttcgcttgaaagaccgattatggcgacattcagcgccttaaaagaagatgtcagcggaaacggaagtgaaaatttcaatgaaaagtggaatgaatttatatcattatatgatttaatttatcccagcctgacaatggatgtgtcggccggccagcttgatacggtggcgaaacatatcgaggtgattgagcaggacgggtttcagcagatgacaaaaggaacaaagcttgagcgtctgacgctcctgcaacaggatttaaagcgggtttttgacaaggtggagcgggatgacgctgacccttcgctgctctgggtcattctgacaacaggcggtatcattattactgcgctgacatatgtcggctaccgaaaatacagagcggaaaaaaagaaagagaaaaagcgtgagtatcctaagtctaaataaacacaaattgctgtaaaggagctaagttagtgaaaaaactcatccagcaattggcttcaaaacacctcccgcagccgatcagaggcagaaaaggggcgactgacgaaggaccgcgaaacctcgcgcgtgacttccagaatcctgacatgctcgttccgccttcaacggatgcaggaacggttcaaaacttgaaattctcattttctgatacgcatatgaggcttgaagacggcggatggtccagagaggtgacggtcagggaactgccggtatccaaaaacatcgcggcggtgaacatgagactgaagccgggagctgtgcgggagcttcattggcataaagaagccgaatggggatatgtgattaacggaggagtccgtttaactgcggtcgatcaaaatggaaggaattttattgacaacgtaagtgaaggggatctgtggtattttccttccggcattcctcattccattcaaggattagagcagggcagtgagtttttgctcgtctttgatgacggctctttttcagaaaacagcaccttttcagtaacggactggtttgcccataccccgcgcagcgtgctggaggcgaacttcggtgttcccggatatgacttggcctacattcacaagaaagagcgttacatgttccagctggaaccgcctcccccgattgaaaaggcagcagtttcttccccggaaggctccgttttggagccgttcagctacaagctttcccggcaggagccccttgttaccagcgggggaagagtaaagattgtcgattcaaaaacgtttaaggtgtcaaaaacgattgccgcagctctcgtggaagtcgaacccggaggcatgagagaattgcattggcatccgaatacggacgagtggcagtactatctttcaggagaagcgaaaatgacggtgtttgcggcggagggaagagcgcggacatttaactatcaagcaggtgacgtaggatatgttccttttgcaatgggacattatgttcagaataccggtgacaccgtgcttcgctttctggaaattttcaaaagcaaccgtttcgaagacgtctccttaaaccaatggctggcactgacgccgcagcgcttcgtcgaacagacgctcaatgtcagtccggcattcgcccgccgattgaaaaagaaaaaatcaccggttgtcaaatggaaacacaaacagtaaaggcggcaaaagccgcctttttattatcgtctgatcggatttttattttcatcaagcgtaaatccttcgccgagcacatcatgaacgtcgcttactgcaacaaaggcgtgcgggtcaacggaagtgatgacgcttttcaaaagcacaatttcgtttttcggaacgacgcagtaaagaacgtccctgtcttcttttgtataggatccctgtccttttaaaacggtgacgccgcgctccatctcttcaatgattttttgctggatcaaatcgtttttcgaagaaataatcgttgccccttttgcggcatagccgccttcctggataaaatcaatcaatctcgcagcgacaaaaacggctacaagcgtgtacatcgcttccttgtaagaaagatacgtaaacaaagaaagcagaatgacacaggcgtcaaaggcaaacatcgtccggcccatcgggattccgaaaaacttgttgatcagcctggcgatgatatcgaccccgcccgtcgtgccgccgtatttaaaaataatgccgagacccgcgccgataaatacaccggcgaacaaggcggccagcgctaaatcatgcgacagcggcatatgaatttcgtaacgctgaaaaacactcagaaaaacagaaagagagacggtgccgatcagggtatagacaaacatcgttcggccgagcatacgccagccgatgaaaaagataggaatgttcaataccaggttggaaatagaagggctgatgtggaataacgcatataaaagcagcgtaatgccggtaaatccgccttccgccaaattgttctgcatattaaagtgaaccagtccgaatgaaaaaacagcagcgccgattaaaataaagcaaatgtttttgattctgatttctccaagcattgcatcaaaccccttttccttccataagattgcgtaaatattatagtggatacaaaagaaaacagcaaactgccgtttttaacatttgtcaaatgtacttgaattagctaacatggaagagatgacaggaggtattcgcacagtgagtgacaaaacgatgaaagacttacaagctgaggtcgatgaatatatcggccaattcaaagaaggctatttcagcccgcttgccatgatggcccgtctcacggaagaactgggcgaacttgcaagagaagtcaaccattattatggggaaaagccgaagaaaacgacggaaaatgagaaaagcatggaagaggaaatgggcgatgtgctgttcgtcctgatctgcctcgccaactcccttgatatttcattggaggaagctcataaccgcgtcatgcataaatttaatacacgtgataaagaccgctggactagaaaagaagaaggaaagtaggagaaaccatgtcaaatgaaaccattaaagtcgtcattgccggaccaagaggcagaatgggccaggaggccgtaaaacttgccgtccgcacgcctcattttgagcttgtcggcgccattgaccatacatacgatcagcaaacattgcgggaagtgatgtcagctgattcagacgctcttatttatacggatatccgcgcatgtttccaagaaacaaaaccggatgtgctgatcgatttgacaacgcctgaaatcggcaaaaaacatacgaaagccgctcttgaacacggcgtccgccccgttgtgggaacgaccggattttctgaagcggatttagaggagcttcaagccttgactgaagaaaaaggaatcggcgccatcatcgctccgaactttgcattgggcgcggtgctgatgatgaagttctcacaaatggccgccaactattttgaagatgtagaaatcattgagcttcatcatgatcaaaagctggatgccccgagcggaacggcgctgaaaacagcggaaatgatctcaagcgtccgtacagaaaagcagcagggccatcctgatgaaaaagaaattctgccaggcgcccgcggtgctgaattaaacggcatccgccttcacagcgtgcgtctgccgggccttatcgcccaccaggaagtcatgttcggcatggacggccagacgctgaaactgcgccatgactcctataaccgggcttcctttatgtcaggagtgaagctgtcagtggagcaagtgatgaaaatcgaccagcttgtatacggactcgaaaatattatcgactgaatcggcaagggggagaacatcaaatgaaaatcgctttgattgctcacgataagaaaaagcaggatatggttcagtttacgaccgcatataaagatatactgagccatcatgagttatacgcgacaggtacgacaggcctgaaaatccaggaagcgaccggattgtccgttgaacgttttcaatccggcccgctcggcggagatcagcaaatcggcgcattgattgcggcaaatgccctggatctcgtcatttttctgcgcgatccgttaactgcgcagcctcatgaaccggatgtctcggcgctgatccggctgtgtgacgtatacgcgatcccgctcgccacaaatatggggacagcggaaatcctcgtccggacgctggacggcggggcatttgatttccgcaatcttgtgcgcggaggagagccgaatgtctgaacacgttgatattctggcgttcggcgcccatagtgatgatgtcgagatcggtatgggcggcacgatcgcaaaatttacggctcaaggaaaaaccgcggtgatatgcgatttgaccgaggccgaactatcatccaacggaacggtagggataagaaaagaagaagcggcagaggcggcacgaattctcggcgtaaaagagagaatccagcttacgtttcccgaccgcgggcttttgaaaagtgaggacggcatccgccggattgtcagtgtcatcagagcctgccggccgaaaaccgttttcatcccttatccgaaagaccgccatcctgaccacggcaatgcggcggctttggtcgaagaagcggtgttctcggcgggaattcataaatacagagatcaccaggaactgccggctcataaggctcagcgcgtatactattatatgatcaatgggtttcaccgtccggactttgtaatcgacataacggaaaccatcgatctgaaaaaagaaagcctgcacgcctatcaaagccagtttattcctacggcgcagtcagtgaacacaccgctgaccaacggttatattgaaatggtggaagcgcgggaaagactgtatggcaaagaagccgggacggggtatgccgagggtttcttttcaaaacagcttcccgttttgaatgatgatgtttttgggggcggacaatgagaccattaaaaatagggattacatgctacccgagtgtcggaggctcgggtattattgcgacggaactcggcaagctgcttgcagaaaaagggcaccaggttcatttcatcacatcaagcatcccgttcagattaaatacatatcatccgaatattcattttcatgaggtggaagtcaaccaatacgcggtatttaaatatccgccttatgaccttacgctggcgagcaaaatcgccgaggttgccgcgagggaaaatcttgatatcattcacgcgcattatgcgctgccgcatgcggtatgcgcttatcttgccaaacagatgctcaagcgcgacatcggcatcgtgacgacgcttcacggtacggacatcaccgttttaggatatgatccgtcattaaaagatttaatccgttttgccatcgaagcgtccgacagagtgacggcggtatcaaccgcgcttgccggagaaacatatgacttaatcaagccggataaaaaaattgaaaccatctacaactttattgatgaacgtgtttatcttaagaaaaatacagagagtataaaagagaaacatggcattttgccggatgaaaaagtcgtcatccatgtctcgaacttcagaaaggtaaaacgtgttaaagatgtcatccgcgttttccgtaatatcgcagccaaaacaaaggcgaagctcctgcttgtcggcgacgggccggaaaagtgcgtcgcttggcagcttgtcgaaaaatacggtttgcaggatcaagtgctgctcctcggaaaccaggacagggtggaagagctgtattccatcagtgaccttaagctccttctttctgaaaaagaaagtttcggactcgtacttctggaggcgatggcctgcggcgtgccgtgcatcggaacaaatatcggcggaataccggaagtgattaaagatcaagtaagcggttttctggtggaagtcggcgatattcaggcggcatctgaaaaagcgcttgccgttttagaagataaacagctcagcaaacgattgactgatcatgcgctgaaaatggtggagaccgccttttcttcgcaaagaatcgtcagtcagtatgaacggatttatgacgaattggcaggaccggagtgatcttatggaacaggaatttgtcaaagccctccccatccttcatcatctgatgaaggcgggccatcaggcgtactttgtcgggggagccgtcagagacagctatatgaaacgaaaaataggtgatgtggacatcgcaaccagcgcttcgccgaatgaggtggagcgtctctttaagcggactgtcgatgtaggaaaagagcacggcaccgtcatcgtcctgtgggaagatgaaacctatgaagtcaccacttttcgtgccgaatcagaatataaggactaccggcgccctgaagctgtgcggttcattacttctttatcagaagacttaaagcggagagacttaacgattaatgcgatggcgatgtctgccgaaggagagctgcttgattatttcggaggcgcacatgatatcggacaaaagctgatccgtacggtgggtaatcctgaagaccgttttcgggaagacgctctgcggatgatgagagcggtccgctttatgagtcagctcggctttctgttagaaaaagaaacaagagaggccgtcataaaagacagggagcttttggcacatgtatcagtagaacgaaagaccgtcgagtttgaaaagctgctgcagggcgcttcctcacaagaagcgattcaaacgatggtgcagataggtttgatacaagagctgccaggcctttccggttatgagcagcaaatgcttgaagcaagcggctttcctttttcttctttagatgcacgcgaagaacgctgggcagcgctgttattgtttctcggtctttgtccgaaaagcgccgaggcgtttttaaaacaatggaaactgccgggaaaagtcataaaaaaagcggtgcagatcataagcgtttatccggcgcagctggaagcggaagcgatgtaccgggcgggagaggcgctgttttcagccgttaaaatcgggatgctgaaaaagcataagacgattgatgaacaaaagctgaaaaaggttcagagcctgtatgagcagctgccgatcaaaagccttcgagacctcgacatttcaggcgctgatctgatggagctcagaaaccgccgcgcgggtaaatgggtggccgaagaacttcgccggatcgaagaagcggtattggcagggaagctccctaaccgaaaacatgatataaaggagtggctcgcatcatgggatcaacattaagaacccgattaattgatttattttctgaggcgggtgacggctttatctccgggcagaaaattagtgacgcgctcggctgctcgagaaccgccgtttggaaacatatagaggagctccgcaaagagggctatgaagttgaggcggtcagacgaaaagggtacaggctcattaaaaaaccggggaaactcagtgaatccgaaatccgtttcgggctgaaaacagaggttttgggcaaacagcttcattaccgggacgtcctgccgtccacccaaaaaaccgctcatgaacttgccaatgacggcgcgccggaagggacgcttgtagtcgccgataaacaaacggcaggcagaggaagaatggccagagtatggcattcacaggagggaaacgggatttggatgagcctcattctgagacccgacgttcctttgcaaaaaacgccgcagctcaccctgttatccgccgttgcggtcgtacaggccatcgaggcttttacaggtgtacagcccgccattaaatggccgaatgatttaatgattcacggcaaaaaagccgtcgggattttaactgagctgcaggcagaagaagaccgtgtccgttcggttattctcgggatcgggatcaacgtgaaccagcaggaaaccgattttcccggcgagcttcaggacattgcgacaagcctcagcatggaagccggcgaaaaaattgacagagcgggtctgatacaagagattctgctgacttttgaaaaacgctatcaggattacttgaaccacggctttacaccgatcaagctgctatgggaaagctatgcggtcggactggggaacgagctcagagcgagaacgctgcaagggacgttttacgggaaatcgctcggcattgatgatgagggagttcttctcttggaaacgagagacggtataaagaagatctattctgccgatattgagctcaattaatcttagttggtacaagcctcgtgaatttggtatacttcctatgggcagtatcataatgaactgcacctgatcagcagaacagagattacgaaaagtctgccttgatccaaaaaaggactgggacagagggatgacattcgccgaaggttaaacaagtggggatccttcttattttacagaaggcttttttgcttgcgaagaattggcggctcatctcctcaccgtttagaggaggagaaacagaatgaaaacaaaactggatttcgtgaaaatgaaggaaaacggagagccgatcgtgatgctgaccgcttacgattatccgcaggcaaagcttgcggaacaggcgggagtcgacatgattttagtcggggattcgctcggaatggtcgtgctcggactcgattcaacagtcggtgtaacggtcagtgacatgattcaccatacaaaagcggtaaaacgcggtgcgaaaaatacgtttatcgtaactgacatgccgtttatgtcttaccacctttcaaaagaggatacattgaaaaacgccgcggccattattcaggaaagcggcgcggacgcgttaaagctggaaggcggagacggcgttttcgaatccatccgcgcgctgactctcggcggaattcccgtcgttagccatttaggcctcacaccgcagtctgtcggcgtattaggcggatataaagtgcagggaaaagatgagcaaagcgcgaaaaagctcattgaagacagcatcaaatgcgagcaggcgggagcgatgatgctcgtgcttgaatgtgtgcctgctgaactgactgctaaaataaaagaagaagtatccattcccgtcatcggaatcggagccggttcaaaagcggacggccaagtccttgtctatcatgacgtcgtcggccacggcgtggacagaacaccgaagttcgtgaagcaatacgccaaaatcgacggcacgattgagtcggccctcagcgattatgtccgtgatgtgaaagaacgggttttcccggaagaaaagcattcctttcagataaaccaaactgtgctgcaaggcttgtacggaggaaagtaagcgatgaaacaactgacagaaactcaacagctgaaagaattgattgcacaataccgctcagaaggccggacgatcggattcgtcccgacaatgggttttcttcatgaaggacatctgacgctggttgaaaaagcaagcaaagaaaacgatattgtggtgatgagcatctttgtcaatccgactcaattcggaccgggcgaggattacgaagcatatccgcgagatttaaagcgcgatgcccggcttgcagaacaggcgggggcagatgttttgtttacgccgtctccaagtgacatgtacaaaggcgagcaaaatgttgccgtgcaagtgaaaaggagaactgacgtgttgtgcggcgcctcccgcgtcggccattttgacggagtggccactgtgctgacgaagtttttcaatctcgttaaaccgacccgcgcctacttcggcctgaaagatgcccagcaggcagcggttgtggacggattaattgaggacttctttatggatatcgaattggttgcagtggacacggtcagagaagaagacggacttgccaaaagctctcgcaacgtctatctgactgagcaggaacgcaaagaagcgccgatgatctataaagcattacagcaaggcgccgaactgatcagagacggtgaaagaaatccggaaaccgttataaaaaccgtcaccgatatcatcgaaaacacaagcggcgtcattgattatgccgaactgtacgcttatccggagctgactccgcttaaaacattaaacggcaaggtcattctggcctgcgccgtccaattttctaaagccagactgattgataatatcattattgatattgatgaatgggagagatcataatatgtaccgcactatgatggccggaaaactgcaccgcgctaccgtgacggaagccaatttaaactatgtcggcagcattacgattgatgaagatcttttagatgccgtcggaatgctcgctaatgaaaaagttcagattgtgaataataataacggagcgagacttgaaacgtatattattcccggtaagcgggggagcggcgtcatctgtttaaacggagcagctgcccgtctcgtccaagaaggagataaagtcattattatttcttatcaaatgatgtctgatcaggaagcaaaaagccatcagccgaaggtggccgttctggatgatcagaataaaatcgagcagatgctgggtcaggagccggcacacacgattttgtaaaagagcccccttcatgggggttttcttttaagatttaggggcaaaagctgtttttccgctccatttctcaacaaaacgtgttacacttttctcgtatgcaagaattgaggtgtccattttaatgaacaaacaacggttcgttgtcatagatgtcgaaacaacaggaaattcgccgaaaaagggcgataaaatcattcaaatcgcagcggttgtcattgaaaatggacaaataactgagcggttttcaaaatatatcaatccgaatcaggccatcccgccgtttattgaacagctgaccggaatttcgtccggaatggttgaaaatgaactgccgtttgaagcggtcgcagaggagatttttcatctgcttgacggcgcgtattttgttgcccacaatattcatttcgacctcggatttgtccggtatgaactgagcgaagcgggctatgagctgccggattgtgaagtgcttgatacggttgagctttcgcgtattgttttcccggggtttgaaggatataagctcggtgagttgtgtgcggagctgaatattgttcatgaccgccctcaccgcgcagacagcgatgcggaggttacgggactggtctttttagacattttacataaactgaaacatttgcctttaccgacattaaagcagcttagaaggctttcacagcattttatcagcgatttgacgctgcttttggattcttttatacatgaaagcaggccggcggaagaaaagcgctgcattccatacgcctctttttcaattaaagagcccgatcacattccggtttcccgtccggtgaatgcggccattgaccttgaaaagtggaacgaagaaaaagaacagatcttatccggcatcatcccccgctatgaaaagcggaaagggcagctttcgatgatggatgaagtgcttggcgccttccgcaatcgggagcatgcgctgattgaagcggcgcccggcatcggaaaaacgatcggttatctcgttccggctgttttatttgccaaagcggagcaaactcccgtgattatcagcacgtactctactcttttgcagcagcagatcatgtctaaagatcttccgcttttggagcgtatgtttccttggccggtcaaagccgctattttaaaagggaaatcacattatctgtgcctgcctaagtttgaacatattctgcatgaggaagatgacaactatgatgcggttttgacgaaagcgcagcttctcgtctggctgacggagactgaaacgggcgacgccgctgagctgaatcttccatcaggcggcagattgctgtgggagcgcatggcttacgatgagaattcttttttgaaaaaagggaaggactcggctgccgggttttatgaacgggctaaagaaaaggcgcaggccgcagatctgattatcacaaaccatgctttgctgttttcagatcaaagcagtgaaacgaaaaaactgcctgcaagcggaacggtcatcattgatgaagcgcatcatttcgaacgcgctgccagcgagcacctggggaagagagcttcatacatcggactgcacacaaagctcagccgaatcggaaccttaaaggaacacggactgttaaagcggatgagaaaactgttttatacgtatgaactgccggcggaaagtttttttgacgccgatgagtggatgaagcatattcaatcggaaagcgacgcatttttcagttcagtgcattcttttgtcaaacgaagaaaacctaaagacgatctgaaccgtctcgtttatagtctcaatcataaaagccaggataaagggtttcacatgataacggacggagccgagcggctttgtgcgatgctggatcagctgcttgacatgttttcagtacaggagaaactgttacatcaaaagcttgatcagatgaaaagcggagcggcttttttagcggccgaatatgtaaagtgtatcagggggctgaaagaatatcgcgatacgttcagcaggctgctgtttgaaaatgatgagaaagaagccgtttgggttgaaattgacgcgaagggcgcaaaaaatgccgtcagtatctatgcgcagcctttggagcccggtgaaatgctggcagaccagtttttcgcccgcaaaaaaagcgttgtgctcacatcagcgaccttaatggtggagcattcttttcaatttatgattgaaaggctcggacttgcggatttttatccgcgcaccaaaagcatcccgtctcctttttcatacgatgatcagatgaacgtcatcattccgaaagagatgaaatccgttaaatatgacggagagcgggaagtcattgagcatattgccaagtatgcagaaatcatgtcaaagggaaaacagccgaagatccttgtcctgtttacgtctcatgatatgctgaaaaaagtgtatcaggaactgaaactcagtatggagatatcaggcattcagcttctcgcccaaggtatttcgggcgggagtcccggtaaattaatgaaaacctttaaaacggcaagccgggcgattttgctcgggacaaatcatttctgggaaggcgttgattttccgggggatgaattgtcaaccgtcatgatcgcaagacttcctttcagggcgcctgacaatccgcttcatgccgcaaaatgcgaatttgccaaaaagcaggggaaaaatccgtttcagacgatttccctgcctgaggccgtgttaacgttcagacaggggatcgggcgcctgctccgtacggcgggagacaagggaacaatcgttcttttagatcagcgtgtaaagacggcgggatacggacggctgtttcttgaagcgctcccgacttcatctcttttggagctgacggatgccgaactcggggattatgtcagccaaacggaataaaagccgcataaacgcggctttcgtggtgtgggatgaggaattgtttttatagtaaaagcgggttcatgccgccttgtgattttattatgccgcgggcgcatcccgttatgactaacaaaatttgttcgaccgatggagggtataaaaatggaaagcaaaattgaaattctgtcaacgattaatgtggagcattcagatgatttatataaaatcgtcgatacattaaaccggactttgaaacgggacaatctgatgttcgggcttgcgctcgacgaagaaaatcaaaatgaagcggtcttcaccatttatcgcacataggtgaaaaagatgagaaaaaaagcattaatatttacagccgtatttggtattatttttttagcagttcttttattttcggccagcatttttaaatctgcaatggcccaaaaagaagaaggccacgaaacagctgccgcagccgctaaagaaaaaacggatctgacagatgctgagaaagtggagacctttgtcggcaaacagaaatattatgttgttaccggaacggataaacatggaaaagatatgtatgtatgggttccggccgacaaaaaagcaaaaattctctcaaaaaaagccagtgacggcatttcaagcggcaaggctgccaagatcgttcgggacgaagggcttgtttccaagctgaatggcgttcacccggcgagagaaaacaatgttccgttatgggaagtgacctatatcaacaaaagcgggcagtatagctttagttatgtggactttacaagcggcaagattctcaaaaacatcacaccgtgagacgtattagggggagttcaagttgaaattggcaaaaagagtatccgcattaacaccgtctgcaacacttgcaattactgcaaaagcgaaagagctgaaagcagaaggccatgatgtcatcggcctcggagcaggagaaccggattttaatacgcctcagcacattatagatgccgcggtgcgttccatgaatgaaggccatacgaaatatacgccttcaggcggtctgccggcgctgaaagacagtatcgcaaaaaaattcaaaaacgaccaggggattgaatataagccgtcagaaatcattgtctgcaccggagcgaaacacgctctgtatacattatttcaggttattctcgatgaaggggacgaagtgattataccgactccttactgggtcagctaccctgagcaggtgaaactggcaggggggcgtcccgtctatgcagaagggctggaatccaatcagtttaaaatttcaccggagcagctgaagcaggctatcaccgagaaaacaaaagcgctcattatcaattcaccgagcaacccgacaggtgttatgtatacgaaagaagagcttgcggaactcggaaaagtgtgtctggagcatggcattctgatcgtttccgacgagatttatgagaagcttacatacggaggaaaaaaacacgtctcaatcgcacagctttcagataaattgaaagagcagacgatcatcattaacggcgtgtcgaaatctcacagcatgacgggctggaggatcggctatgcggcgggttcggagacgattattaaagcgatgacgagccttgcgagccacagcacatcaaatccgacgtccatcgctcaatacggcgccattgcggcctataacgggccggctgagccgctggaagagatgagacaggcatttgagcacagactgaacaccatttacgctcagctcagtgaaattcccggattcacctgtgtcaagcctgaaggggcgttttacttgtttcctaacgccaaagcggccgcagaaaactgcggattcaaagatgtcgatgaatacgtcaaggcgcttctggaagaagaaaaagtcgccgtcgtgccgggctcaggcttcggctcaccggacaacgtccgtttatcttacgcaacgtcactcaatcttttagaagaagcggtcgaaagaatccgccgcttcacggaaaaacacagctgattctgaaaaagcggcttttaaagccgcttttcacttgcattgaccccgttagagtagaacgggtataataaagtgatgaaaaaagagattcaggcagattcctgaatgtctttcttgttctggagggaaagagtttgaaaacaacaatcaaccaagtgtataaacacacaggcgaggaagtaacgattggagcttgggtcgctaataaacgctcaagcggtaaaatcgcatttttacagctgagagacggtacaggcttcattcagggagttgtcgttaaagctgaagtagaagaagacatcttccaaatcgcgaaatcagtgacacaggaaacgtcactttatgtaaaaggaattgtgaaagaggacgagcgttcaccgctcggctatgagcttgctgttacatccattgaagtcattcacgaagcgactgattatccgattacgcctaaagagcacggtacggaattcttaatggatcacagacatttatggctccgttcgaaacgccagcacgcaattatgaaaatccgcaacgaaatcattcgtgcgacttatgaatttttcaacaaagaaggcttcgtgaaagttgatccgccgattttgacgggaagcgctcccgaaggcacgactgagctgttcgcgacgaaatattttgatgaagacgccttcttgtctcaaagcggccagctgtatatggaagcagctgcaatggcgctcggaaaagtattctctttcggaccgacgttcagagcggaaaaatcgaaaacgaaacgccatctcatcgaattctggatgattgagcctgaaatggcatttgttgaatttgaagaaaaccttgaagttcaggagaattatgttgcatacatcgtacaaagtgtgctggaacattgtaagatcgagctgaacacattaggtagagacacatcgaagcttgaacaaatcaaagcgccattcccgcgcattacgtacgataaagcgatcgaattcctgaaagaaaaaggctttgacgatattgagtggggagatgacttcggtgcgccgcatgaaacagcgatcgcagaaagctatgacaaaccggtgtttatcactcattatccgacgtcattaaaaccgttttatatgcagcctgccaaagatcgtgacgatgtcgtgttatgtgccgacttaatcgctccggaaggctacggggaaatcatcggcggttcagaacgcgttcatgatatggatttattggaagaaagattaaaagaacacggtctggattcagatgcttacaaatggtatgctgaactcagacaatacggttctgttccgcactccggcttcggcctcggacttgagcggacagtggcttggatcagcggagcgcctcacgtgcgtgaaacgattccgttcccgagacttctgaaccgtctgtatccgtaatagttatgaaaaacgaagtctcctgcaagggagactttttctaagtaaaggggaaaactcccggagataaccttttacagtaagaggtgtaaggatgaaaaaacagcaatttatagatatgcaggaacttggcatttcaagcattcccaacctgctgttgacacattaccggcagctcgggctgaatgaaaccgaattgatcctgcttttgaagattaaaatgcatttggaaaagggctcttattttccgacgccgtttgaacttcagtcaggcatgtccatctctgctgaagaatgtacaagctgcctgagaatgtttattcaaaaaggttttctgtttattgaagaatgtgaagaccataacggcataaagtttgaaaaatattctctgcagccgttatgggcgaagctgtatgattacatgcagcattctcaaaatgaaacgcaggaaagaacgtcagaaagagaacaaaaaagcctgtataccatctttgaagaagagttcggaagaccgctgtcgccgcttgaatgcgagacgctggccatatggcaggaccaggatcagcatgatgcgattctgattaaacacgccttaaaagaagccgttttatcggggaaactcagttttcgctatattgaccggattttatttgaatggaaaaagaacggcttcaaaacggttgagcaggcgaaggcgcacagccaaaaattccggcgtgttcaaacgaaacaaaacgatccgcaaaaagagtatacgaggcaggtgcctttttacaattggctggaacaataacatgagaaggggagaaacgtgttaaatttaaagcagattgaatattgtcttgaaaaaatcggcgatatgtttccgcacgcagaatgtgaacttgtccattcaaatcctttcgaattggttgtggcagtcgcattatccgcgcaatgtacggacgctctcgtcaacagagtgacaaaaacgctatttcaaaaatataaacggcccgaagattatcttgccgtatcgctggaagaactccagcaagatattaaatcaatcggtctgtaccgtaataaagccaaaaatattcaaaagctgagcaaaatgatcatcgaagagtacggcggagaagtgccgaaagaccgggatgagcttgtgaatctgccgggtgtcggacggaaaacggcaaatgtggtcgtgtctgttgctttcggcgtacctgcgattgcagtagacactcatgtggagcgggtctctaaacggctcggtatctgccgctggaaggactctgttttggaagtagagaaaacattaatgaaaaaagtgccgaaagaggattggtctgttacgcatcacagattaatatttttcggcaggtatcattgtaaagcgcaatctccccgctgtgcggaatgtcctttgcttccgctatgcagagaagggcagaagcgtgacaaaaaagggctggtgaaacggtgacggcgattgacattctggcaggctatgaaacatacctgcgcagccttacggacttggaaagccttgagatcaaaacggcgctgcgccgccatccgctgtatatggatttcagcggtcagccaaccgtgcagccatggagggaaaggggcgaatatgtcccgtttctgtttcaagtttggaatgaaacgaaagaaacgctgcttcccgtttttcaaacaagaaaatcgagatgtgatcaaaatgacatgctgaagggaattgcctgtctgattgccgcttttcactggacggcaggggagcgggtcacatcactcgattggtctgtgcttgaaacaaagcattttcccgccgaaccgatcaattgggcggagcgaatggcgtttattttaacaaaaccgactcaatttcactcctttattcagctggatgaattgatgacggagatgaagaaacaatatcataaatatgaagtcatgaacaaaagttaaaaacctccttttcttataaggaggtttttttgtatgaaaaaaatccttcacctgtttgaggtgaaggatttcgtccgccgctaatgagcggaatttgactggatggttgacgaattggactgcccgttgatatttgaagatgagtcttggtttttgtccgtttgaccgctgtcaggtttatttgagccgtctgaaccggaatcggaatcattatcagggccgttatcttgctgtccgttgttatcggtcccgttaccgggctgattctgattgttgttatctgtttgatccttatcggattgatcctgatttttatccgggtcatcagttggtgtttgatccgatccgtcagacgtatctgtttgattgtcatctgtgtttgaatcatcggtttgcgtcttgtccttatctttatcttcatcagatttctgttcatcgtcagtcgctttatctttatctgcatcgtcttcttcatctttcgggactttgaaagatgctgatgccgtatcgctttttccgtcatcgttttccgctgtcacctggaagctgtatgtggagcctggtgtgacatctgagacgacggcttcttttgccgaactgttttgaatgtcactgtagcttccgccgtcaacggattgtttgacattgaatgttgcatcaccgtcataatcccagcttaaggttaatgattttttatctttgtcgtatttcacttgcaatcctgtcggtttatcggctttttctttcgtgtacgttttagaaacggcagttggctgcgttcctttcacgaagtactccgtcacttttttatcatccggcgtattcggtccggctaaagcggcaggattcgagcctttctcaactgtttcttttacgacgctgtcaggctgcttgaagcttcctttaccgtcatcaacgtaagagatcagcttttggaaaatccgttttgcgacttgctggtctgcagaagacagtgatttcttgcctgctttgttgccagactcaactccggtccaaaccgccgctgtatattgaggggtgtatccgacaaaccaggagtctgggactccgcctggagcaatgttatatttttgaatgtcctctttagtaaagttggtcgtacccgttttaccggcgacttccacgttcggcacctgagccagtttacctgttcctgattcgacagctgatttgagcatatcggtaatcataaacgctgtgtagtcgctcatagcacttttcggtttcggtgttaaatcaagcttagtgccgtcattaaattcaatcgatgtgaccgcgtgcggttcgttgtacgttccgttatttccgaacgcactgtaggcgcctgccatggtcatagtagatacaccgcggttaccctcaccaaatcccccgatagagtagggttcatatacttgatctttgtttaatcccaatcctaagtcgtttgcgaagtcgacggcattatcttttcctgctgcttggtatgcttttaaagcaggaatattacgtgagtctgcgagggcctctcgcatagatatctgacctctgtatttattgtcccaatcatgaatcggtgtgccgtcagagtacgtataagctgagtcgtcaatctgctcgtaagtcgaccattttttattttcaatgaccggcccgtaatcaagaatcggttttatcgttgaaccgggctgggttttaccttgtgttgcataattgaatcccccggcagttctgttccgtcccggtccgatggcacggatttctccgtttgtcgtatcaaggagcgtgacgcctccctgcatgccttccgaaaagccaaccgtgtctccgttcatcaattgatcaagataatcttgtgccttcgtatcaagagtcgtgtaaattttcagtccgtcagttgaaatattgacgtctttcttttcttttgtctcaatttctttcataacttcttcgacaaaagcgctgtatttatttgtgtcctttttatcgtattccttttggctgacgacgccttcatctttcatggacactttctttgctttttggtagtcagaatttgaaatgaatccttgtttttccattaagctgagaacaatgtttcggcgtttttcggaagccttcggatttttaaccgggttatatccggtcgggctttgcggcattccggcaagcgtcgccgcctgttcaaccgtaagcttgctcaaatcttttacgccgaagaattcttcagccgctttaccgacgccataggcacgcggtgagaaataaattctgtttaaatacatttctaagatttcatctttagaataatggcgctccagctgcagtgaaagccacacttcctgtgctttccgtttaatcgttttctgatgggtcaaaagtgagtttttcacaacctgctgggtgattgtgcttcctccctctgaaccgaatccatccgtaaagttggcgaccaaggcgcctccgatccggatcgggtctataccgtggtgcttataaaaacgggcgtcttcagttgcgataaatgcttctttcacaacatcgggtatatccttaatcgggacgtaggttcgtttttcaccgcccacttccgcgatttctttgccgtttttatcgtaaatcgttgaagagtaaggcgttttcagcttggcttcgtccaaagacggcgcgccggaaaccaaaacggcaaatgccgccgctccgccgactatgcccaggacaaacagaataaccaaggacagtacaatctttttgaataaaccgcctttacgctgtttcttgccttttttcggtgaagagggcttagtgcttttcgtctgccttgccttacggcgttcttcacggctcgtaaattgatctgacataacatctcaacctttcgtttatcaacctttcgctcagtctactgttcctgcgaaaaataaagctgttcaataatactaatataatcaattctcggtgagtatccaagggaaatcggaaaggaagcatcttctaattcgtctttgcgaattgattttctgccattgttctcctttctctcccaaaagacaaacagcttgtcggcttcgaggaaataaacctttccgaaagcggatataataacaaaacaaatgccgtcttgtctgaccacctgcttcatatgctcaatctgatgatcatgaaaattctgcaggggaaatgccgttttgttttttgtttcttttgcctcaaaatcaatgtagcgccctttataaatgccgttgtagtcagttgtggaagactgtttaaaataagcttccttaatgactgcggcgcttcttttcggatagtggacgtttacaatctggacgggtgtcggctttttgtgaatgacagcaatttggttagccagataatacttattcgtttcattcaggtcgtcttcgagggtcatgccgcgattactgtatgaatgggaccgtttctggctgttttgggatgaaaccgttttgttcggctgaaaagtttttccattcgggtaccgaatcactttttccatcctccttatcaaactaatagtgacggaagtgaatgaacgtgcataaacgacagaccgtaaccgccattcttcgcctgatcgaaaaagagacgaaaataaaaaatgccgataatatttcccggacgaatgcctataaagcatattatgaccgccatcctgagatcaagtggccgcttttggcatcgtttgtgtcccgcaatgcgggctggtcgatgactgatttaagaggcgtcctttatcaggagggccttgacagcagtcagaaaaactggtttttcctttcgtatgaaagggcgaattggctgattttttctgatgcctatcctcagcttctggtctaccagtggtcaaaacaaatcggcgaacctcttttccgtcatcttccttatttccgcgtctcggcttttatgcaggaagaatggttccgcttttggcgtgacggagatacggaacggctcatgtatgctcttattataaatgaacaaaacactatccaagcacctattatacaaaatccttcgtttaaaaagaatgtttttggcacgattcctttttatttaagtgattgttttcactttaatacggtgatattcccttcatttgacggacatttatacggaatttccgtcaaacggttttcaaaaaccgaagaaagaattacgctcggaaaacagctggcccgccttctgttcagccctgatcttcacgcttctttttaccgttttcttgataccgttcctcataccggttcacgctttgatatggagaaaatgatcggcatcaaaaaaagaacatcaccgatgctgaggacaacctatcccattgttgcccacccattagacggcgaaagggcggattggtttcaaaaaaggttaagaaaaggggctttcttacaggagaaaatgccgaaacagcttgaactgacggactggtacttccagaaaagacgggagctccatgcgctcttcgcggttaaagagtggctgaagaaatgaaaaagcccgaaaccgttcgctggggtttcgggctgctgatgtgttacgtggaagggcggtttgggccgcctaattttttatcaagcgtatcagtcgtttttgcttcggttttttgctgtttacctgcatttttcggtctcgttttcatacggcacctcctcaactgtatcgtttgcattaacgtgccggttcatacaaagtttgcggcacttttttgtcgaaaggcacgccttttaggataatctctgtttgtttgccgaactgcttctagttttgtcatgtgcagaggagagcggtatgaaaacgagaattatattctaaagagacgcaagtgataaaagggaggaacatgaatgtctgtttacacgagcaaggctgatattctccgtctgctttctgatattgaaatccggatttctgctgctgaaaagacgcttacccaagcagtcagatcctgtcaggcggaagctgaagaaatcagacaggagaaactttcccgccttgaggaagaggcgcgggagcttcatgtttgtattgatgacctgtttttggctgaccggcgtaaaaaggatttgccgagagcctgccggatcagctgattttatgcaaaaactttggtaccatatgtactgaggtgagtccgtttgcagacacagtcgttattggagctgacagaacaaatgatagaggcggttctggaagccgaaaaaaggtatcaggatggaaaagagtcaggccgttcatatgatttttttgagattataaaacccgatgttgaaaaaagagaccggctttgcgcgctttggacagaagcagcacttgcgtttattcgggaaaaccgtccgaaatacgttcatcacgcacaaattcaggccgttacagaaaatttcggagagctgatgctccaatcatatgttcatcatattcataaaaaaagatacagggatttaactgaatctgttttatatacgcttcgtatattaagggatgaaattgaaaaagaaggcagctgaaaacggctgccttcttttatataaaggggtcgggtatgttattcatacgccgggttttctgctccacttgcttcgagaaccttcatactgtttcgaaattcggttgcggtgagatggccttgaatatagaggaattttgcaaagtccatcagtttatctgcacaatctgtttcatattttttcacttcagcaaaacgctttcttaagtatgatacgttcataatggtgcatcccctctcatgtatgttgagattatggtaacataacgattcgacttttttctgtttttaaaaaattaagactttcgacagcatttgacaaaaatcagaatcaccgaaagcacataaccacggcggaattcatacatatatagcagaaacttagtgagagacaagggggaatgtcatatgcaatggagagcgcagccatatcaaaatatgtaccagcagccggcgggatatttctacccgcagcagatacagccattacagcagccgagtccgcagcagatacagccattacagcagccgagtccgcagcagatacagccattacagcagccgagtccgcagcagatacagccattacagcagccgtatccgcagcagatacagccattgcagcagccgccctatcatcagcaagggcagtacccgcagcaattttatccgaatcaggaatacggtcatatgcagcagccgtttgctccctctcctcctcaggcaggcatgcccggggggcagccggggtttgtgaatccttaccccgttcccagaccgaatcagcagcagtcttcccaattctcaggcatactctcccagtttaaaaaaacgaacggacagtttgactttaataaaatgatagatacaacggggcagatggtaagcgccgtaaatcaggtcggatcgctggtgaaaggcttcaccagtatcttcaaataaaaagcatgaatgatatccatcattcatgcttattttttagggaaaaagagggtaagcgtctgttcattccaggatgtttccatatcttcttcactcaccttatacgggaggacaacggttcttgtcatgcttgaagacacatgggatgaatgagcctgtttatgatcgtagcggattgtaacgtgaaggtagcaccccttcgtttccaccagcatatcaccgtcacggaatgtctcgggaacgctgatatcaaccgcgaggcccgtcggctcttctctgacgtcaatcgtcacttgcgcttcagtaaaagccgaattgacaaggtgctgaaaaccctgcatcaattctgcgaagggacctgagtgaaaaaattggtccatcgcatggctgatgatgtcctcatttctttgcggatcaagtttatcgttttgtgattgatccatatgaccaccgcctttttacaaacagactatgcgatgttatgccgtatggttaagaattgaaggaaaaaagaaagtatggttaaatagtggagaataaactggtaacggattcacatttaggaaggggagcacaacacattgctgaaaaaattattcggattgggagacagccggaaaaagccggccgaggaagtgattttttctccggctgacggagcggtgatggatttggcttcagtgccggatcccgtattttcacaaaaaatgatgggggacgggattgccgtcgagcctgcaaacggagacattgtttcaccggttgagggagaagtgattcagctgttccatacaaaacatgctgtcggcatccgcaccctttccggagcggaacttttgatacatgtcggtttggataccgtcaatatgaacggcgaaggctttgaagcgcatgtaaaagaaggagacaaagtgaaaacaggcgatctgcttttaacgtgccggctggatttaataaaagaaaaagcaagcagcaccgtcatccctatggtgattatgaatggcgatgccgcagaacctttgcaatttgcaggcgcaaatgaagcgaaaaaaggacaaacagagctttttaagataaaaatgaagtaggcaggggctgattccctgctttttttcttgtgcaggattttcatctagccaggcaaacaaatattcggtaaactgtacctcataaagaggtgtgaacgatgaagaaaaaatcattgagcgaactgattcaggaattaaaaaatcatgaaaatattgtgcattggcatgaagaggaaccgcgggaggcgaaaaccatgccgatgccggagcaagtagatcggaaaattcgggcggctctcgaaaagagggggatcgagcggctctttacacatcaatactccgcttttcagacggttcaaaacggagaaagcattgtggctgtcacaccgacggcctccggaaaaacactgtgctataatcttccggttcttcagtctatcgcggaagatgcctcaagccgcgcgctttatttatttccgacaaaggcgctcgcgcaggatcaaaaaagcgagctgaacgaaatcatagacgagacgggcatggacattaaaagcttcacctatgacggagatacgtccccggccatcaggcagaaagtcagaaaggccgggcatattgtgatcacaaaccctgatatgcttcattcagccattcttccccaccatacaaaatgggtgagtctgtttgaaaacctgaaatatatcgtcattgatgaattacatacgtaccgcggcgtattcggcagccatgtggcgaacgtcatccgccgtttaatgagaatctgcgctttttacggaagcacgccgtcatttatctgtacatccgccacaatcgccaatccgagggaattggcggagcagctgacgggaaaatcagtgcgcctgattgacaataacggcgccccggccggaagaaagcactttgctttttacaatcctccgattgtaaataaaccgctgcatattcgaaaaagtgccaccgtggaagtgaacgaacttgccaaaacttttttaaaaaataagatccagacgattgtttttgccagaagccgtgttcgggttgaaattattttaagccacattcaggagatcgtaaaaaaagaaatcggtgcgaagtctgtcagaggttatcgcggcggatatcttccgaaagaaagaagagaaatagagcgggggttaagagacggaagcattctcggcgttgtcagcacaaacgcgctggagctcggcgttgatatcggccagcttcaggtctgcgtgatgacggggtacccgggcagtgtcgcgagcgcatggcagcaggcgggccgagccgggcggcggcagggagaggcgcttatcgtgatggtggcgaactctgatccgattgaccaatatattgtgcgccatcctgattatttctttaaacgctcgcctgaatctgcaaggatcaatcccgataatctcattatattggtcgatcacctgaaatgcgccgcgtatgagctgcctttcagagccgatgaaacattcggagaaaatgatgcaagagacattctcgagtatttagaagaagaaggggtgcttcacgaaaaccgcgaacgctatcactgggcgagcgaatcttttcccgcctccaacatcagtctccgttcggcgtcacaggaaaacgtggtcatcgttgaccggtcagagacggctgatgtaaaaatcatcggagaaatggaccgcttcagcgcgatgacgcttcttcatgatgaagcgatttatcttcatgaaggggtgcagtaccaggttgaaaagcttgattgggatcataaaaaagcgtacgtgcgaaaggtcgatgtcgaatattatacagatgccaatttagcggtgcagctgaaagtgctggacattgacagaacggacagcagaaagaaaacggccttacatttcggcgatgtaaccgtgaacgcacttccgacaatatttaaaaaaattaaaatgacgacatttgaaaatataggatcagggccgattcatcttcctgaagaagaactgcataccagtgcagcctggcttgaattaaaagagacggattcggagatcggcgaaaaaacgcttgaacagctgcttttaggcattgcccacgtcttgcagcatatcgtgcctgtatacgtcatgtgcgaccgaaatgacgtgcatgtcgtgccgcaaatcaaagccgcacatacgggacttccgacaatctttctgtatgatcattatccgggcggaatcggacttgccgatgaagtatataagcgatttgatgaaatcaatgaaggggctgagcgcctgatcagacaatgtccatgtcaagacggatgtccttcctgcatcggctccgaaatagaaggaatagatggaaagaaagcgatactccggctcttgaattacgtgtaaaagaaaagggggacgaaagatgtccttgaaaaataaattaaagcggatgaaaaaccacctgaatgtgccggaagctgaaaaaaagccggcagcttcacaactttcggtcccggatattcaagtcccatttagagaagaatgggaggcattcggagtgaagcctttcttttttgaggatgaatactgtcttatccgcgaaaccgtctatccgctttcgcaccgccacggacggtacagcttcagtgaacttgatgacgtcatggcattatggaataaaggcggtttgacacatactttatcagcagaaggatacgaaaaaagccagctgttcttctttgatactgaaacgaccggcctcggcggcggggccggcaatatgatttttttgctcggtcatgcaagagtgtatgaagaccgtgtcgcggttaaacagcatctgcttcctaaaccgggaaacgagacggctctttacaaaagctttttaagtgaggttgacattacgtcccttgttacgtataacggaaaagcctttgactggccgcaggtaaaaactaggcatacattgctgcgggacaggcttccgaagcttcctgacttcggtcactttgatcttctgcacggggcgagacggctttggaaacataaattagagcgtgtatcgctttcggcggttgaaaatgaagagcttgcttttaaaagggacgaagacacacctggttatttggcgccgatgctgtattttcaatttttaaaggcggaggatccggctcttttaaagggagtgctctcgcataatgaacaagatgtgctttccctcatcgctctttacatccatatgtcaaaaaagatttttgcatcttctgatcagacgtcagaacgtcaggaagcatacgccatggcgaaatggtttatcgctcataaagaaaccgatcgggctgtttcacagctggaagcgctgcaaggcaaagactttgaagattcggatcgggccctttttgacttagcaatgctttataaaaaacaaaaccgcaggcaagacgccgtgcccctttgggagaaactgacgggctctgatcttcacatatgcagacaccaatcagcggtagagctggcgatctattttgagcatcacgcaaaagattataaaaaagctctgcaggccgcacagcaggcggcagaagacggggaaatatcggaaaaagaagccgagaagctccatgtgagaattgcccggcttaagaggaaatatccttcttgaaatattgcccgggaaagcgcaaaagccgagctgtttcgccaaaaatatttttttctgaatccgcatcgattttgttgtagaatggtgccgcatcttgtaaaatagcgttagttatttataggggagagttggtatgtataaaggtgttttttacttgttctttgtcgtggtttttttgattgcgtttgtattttcgaattttaaagacagcttgctgacacacttttaaattgggtgattgaattagaacatgcaccctcttttcttcataacctaacagtgtaatataagttaatggagaggggatttagcatgtttcatcatcattgttgcagaccaaacgtgatgccgccgattgtccatccgactcattgctgtgaacaccattgtttttctaacacagttgtgccgcatattcatccgcaacatacaactaacgtaaatcaccacaactttgagcacgttcattactatccgcacactttttcaaatgttgacccgacaactcaccagcattttcagtgcggaagcccttgctgcgatcattagtattgaacgcttaagcaagatcggttaggatatcagcaaatcaaaatggggcccgatggggagccccattttttaagcaggtgatcaattgaaagtattagccgtaacaggatacaagccgtttgaactcggaatttttaaacaggatgaccgggcgcttgtttatataaaaaaggcgatagaaaccagactcagaagctttattgacgaaggcttggaatggattctcatatccggacagctggggactgagctttgggcggctgaaacggcgtacgatctcagagaagagtatccggaattaaaggttgccgttatcacgcctttctacggccaagaagaaaagtggaaggaaccgaataaagaaatgtatgaagcggtgcttgctcaggcagattatgaggagagcctgacgcatcggccgtacgaaagtccgctccaattccggcagaaaaacgcgttctttattgaaaagtcagatgcgcttttgcttttatatgatcctgaaatggaaggatcgccgaaatatatgctgcagcaggcagaaaaacgccgtgaaacagacggatatccgatttattcgattacgatggatgatctccgtgccgccgttgaagaagaagatttctttacataacacgtcagagaatatttgacaacgggacgtgtttctgaataaaatataacatgatgattcacgatatgaggtgaaaaagatgcttgctgataaagtaaagctttctgcgaaagacattttggaaaaagaatttaaaacaggcgttagaggttacagacaagaagacgttgacaaatttttagatatgattattaaggattatgaaacctttcatcaagaaattgaagaactgcagcaagaaaatctgcagctgaaaaaacagcttgaagaagcaagcaaaaaacagccggtgcagtccaatacgaccaactttgacattctgaaaaggctgtccaaccttgagaaacatgtattcggcagcaaactttatgacgaatagggcagatgcacttgtcaaatgagacaagttgctttataatgaacaagtgttcttaacgttcgggtaatcgctgcagatctttgaatctgtagaggaaagtccatgctcgcacggtgctgagatgcccgtagtgttcgtgcctagcgaagaaataagctagggcagccttgataggctgacggcaggaaaaaagcctacgtctccggatatggctgagtatccttgaaagtgccacagtgacgaagtctcatcagaaatggtgagagtggaacgcggtaaacccctcgagcgagaaacccaaattttggtaggggaaccttcttgaaggaattgaacagatagaaggacagaatgctttctgtagatagatgattgccgcctgagtacgaggtgatgagccgattgcagtacgacggaacaaaacatggcttacagaacgttaaacattattgatatgacaaattagagctctcctttaaaggggagcttttatcttgaatgagacgaaagcttaaaagagacagggtgatacgatgaagaagtacacactaatagcgacggcgccgatgggaattgaagcgatcgtcgccaaagaagtgcgtgatttaggttatgaatgcaaagtagacaacggaaaagtcatttttgaaggagatgcgcttgcgatctgccgcgctaacttatggctgcggacggctgaccgcatcaaagtacaggtcgccgagtttcaggcgaaaacgtttgatgagctgtttgaaaaaacaaaagcgattgactggcgcgcgtacattccggaaaacgcaaagttccccgttatcggaaaatccgtgaaatcagtgcttgccagtgtgcctgactgccagcggatcgtcaaaaaggcgatagcggaaaagctgaaacttcaatcaggaaaacaaaatgaatggattgaagaaacgggccccgagtataaggtggagatttcccttttaaaagataaagccgtgcttacactggattcatcaggaacaggccttcacaaacggggatacagggttgatcagggaggagctccgattaaagagacgctcgctgccgcgttaattcagttaaccaactggacgcctgaccgtccgttcgtcgatccgttctgcggttccggcacgatcgccattgaagccgctttaatcggacaaaacattgctcccggttttaaccgtgattttgtttcagaagactgggaatggatcggaaaagaactgtgggacaaggcgcgtcttgaagtggaagaaaaggcgaactatgatcagccgctgcagatctttgccagtgacgtagatcaccggatggtaaacatcgccaaagaaaacgcagaagaagcgggactcggtgacctgatcgaatgcaagcaaatgcgggtgcaggattttacgacgaaactcgaatacggcgtaatcgtcggaaaccctccgtacggcgaacggctcggcgaaaaaagggaagtcgagcagatgtataaagaaatgggccgggcatttgaatctcttgatacatggtctgtctacatgttgacgtcaaatgaacaatttgaagaggtctacggaagaaaagcaaccaaaaaacggaagctctttaacggttttatcaaaacggattattatcagtactgggctaaagtgcggccgcagcggaaaaagccgcaacaaagagaagacgcctgaaacagcgtcttctccggcatctttacgttttattctgccattaccagcggtgcgcttttgcgttgctccgtaaaataatgttggtctgggacatttcggtgtggccgttcacttgcgatttagagcgtttcggccgcgtccaattgtgatgaaacaattcagaatgctgatctaatcgatctttataactcatgtaaccatcactcccggatagaataattttgtgaagatggatattcgatcgaatatctgttgtagtttgtgcaggtcaggtgcggatcattcagaatggcatgtatagaaagtgaagcatcggcatagaatgatgattatttctatttgagaggtgatctattttatgctgaacagcgagcacttcagtaaaatacaaaaggcgttagacgcaactgctttccggctggaggaagccggagcggagttcggtccttccgccatgacacacgcacaggaagaacttgaaaatgcggtaaaacatacacattcaacagaccatccgttcctatgtacacatatcattgaccggaaatgataatggcaaaaacttggcgaggccaagtttttttgttgtattgaaaagggttaaatgatattatagatggtctgaatgccgaatagttaggggttggagttgggtgacaacatcacgtttgccttttgctttaacaaaagaaaagaatttttacgaagaattgaacaattggattggtgacgtgttttacgatatccttcccgagaaaggctttgaccttcgggatgagcaggtatttatggcgtttcagcttgaacgggcatttaaagagaaaaaagtcatgttcgctgaggcaggagtcggtacggggaaaacgctggtgtatctgctgtttgccatcagctatgccagatatacgggtaaaccggccattatcgcatgcgccgatgaaacgttaattgaacagcttgtcaaaaaagaaggcgacatttccaagctgacagaacatttggatctgcagattgatacacggctgtccaaatcccatgagcagtatttgtgtctgaaaaagcttgagaaaacgatgcagcgttctgatgatgaaaagtggctggatctttatgagtcgctgccttcattcgtacacgagtcacaagcgatgcagcgcttttatccgtacggcgaccgcaaacagtacgctgatttgacgaatgaagagtgggcaggcgtcagctatgattccttccaagattgtttaacttgtgatatgagacatagatgcggtttaacactttcgagagatcattacagaaaatcaacggatctgattgtttgctcccatgatttctacatggagcatgtatggacggaagaatcacgcaaaagggaaggacagctgccgcttttgccggatcacagcgccgtcgtatttgatgaaggacatctgctggaattcgccgcgcaaaaagcgttaacgtatcgtgtgaagcagtcgacgcttgagctgtttttagagcgtctgcttcaaaatgacatcagagaggaattcgccgaactgattgaagatgcccttgccgcaaacgatgagtttttctatgtgctgtcagaggaatcgaaggaaatcgcaggctctcaccgattggacatccaaaacgaccagcgtgttaagcgtgcggctgacgaactgtgccgtctgctcgataaaatcggcgaggcgctcgtatttgaatcggaaatgtatacgatcgataagtacgagctgtcagttgtagaagaatacgtcgaacaaatggcatattcgctgtcgctgtatcaaaaggatgccatcagctggcttgaaacgcgggatacagactcaacgtttgttgttatgccgagaactgtagccgaagttttgggagaaaaggtcttttctaaaaagattccttatatcttctcatcggccactctttctgagggcggttcatttgattatatcgctgacagcctcggaatccgtgatcctttatcattcaccgttgaatctccgtacgattacgaggagcaaatgtctgttgcgcttcacggtgacatgacgtctgagcagaaaacagccgaaacgattgaaaccattaagaagaatgaaggacgcaccctcgttcttttcccttcctttgaagacatgaaggaatttaaagaacaggctgccgcgtgggagctgccgtatccgatatactacgaaggtgacgaagagatctccagtctggtcgaaaaattccagcgggatgaagaatccgtgctttgttccgtccacttatgggaaggtcttgacattcccggtgactcgctccggaatgtgaccatttgggcgttgccgtatccgcctcatgatcccgtgtttaccgcaaagcggaacggagcgaaaaaagatccgtttgaggaagttgatctgccgtacatgctcttgagagtccggcagggaatcggccgcctcatccgttctaatcaggacagcggaaccatatccatttatgcgggcggagaaagtgaacgggtcttggccgaagtcaaaaagatcttgcctgttacaccgaaaatcgtataaaaacaaaagctgcaggattcttatcctgcggcttttttaaatccgggaagttgactttatcacggcattccattagcctgtaattgatagtgaaaagggaggggaacggatatggatttacatacatatgaaaaagagttttttgatctgttaaaaagagtatcccactatgtcgaagccattgcacttatgcattgggacttaagaacgggagccccaaaaaaaggctctgatgaccgggcggaaagcatcggacagctgtcggctgacgtttttcaaatccagacatccgaccggatgaaagagctgatcgacatccttctcgcgcatgcagaggagctctctgaagatacagtgaaagcggcggaacttgcgaaaaaagattatgatcataataaaaaaattcctgaagatgagtataaagaatatgtcattttaacatcgaaagctgaaacggcttgggaggatgcaaaggctgcctctgatttttctatgtttgctccgtaccttgagaagctgattgattttaataagcggtttatttcgtattggggctatgaagatcatccatacaacgcattgctcgatattttcgaaccgggtgttacggtaaaggtgctggatcagctgttttctgaattgaaggaagcgattattccgcttatcaaaaaagtgacggaatccggcaataaaccggacacttcctttataacgaaaacgttttcgaaagaacaacaaagagccctctccttgtatttcttaaaagagttcgggtatgattttgacggcggccgcctggacgagacggtgcatccgtttgcgacgacaatcaaccggggcgatgtgcgggtgacgaccagatatgacgaaaacgatttccgcacggcaattttcggaacgattcatgaatgcgggcatgcgatttacgagcagaatattgacgaagcgctgagcggaacgaacttatctgacggtgcatccatgggaattcatgaatcccaatcgttattttatgaaaactttatcgccagaaatcaacatttctggaccgcctattatgaaaaaatggttgaggcttcgcctgatcaatttcaagatgtgaaaagagaggactttgtacgcgccgtaaatgaggcgaaaccgacatttatccgaattgaagccgatgagctgacatatccgcttcatattattatccgttatgaaattgaaaaagcgattttcagcaatgaagtgacagtggaagaactgcctgcattgtggaatcaaaaatatcatgattatttaggcattacgccgccatctgacgcaaaaggcattttgcaggacgtacattgggcgggcggagatttcggctatttcccttcctatgcgctcggatatatgtatgcggcacagctgaagcataccatgcttgaggatctgcctgaatttgaccaattaatagaacggggcgattttgagccgatcaaacaatggctgacagaaaaggttcatcagcacggaagacgcaaaatgccgcttgacatcataaaagatgcaacgggagaagagctgaacgttcaatatctcattgagtatctcgtcggcaaatattcaaatttatatttataaacgaaacgcccggcatacaccgggtgtttttctaaaaattctaaaaacacgaataatcgaaaaccaattctttgtaaaagttcggaaatattcaaatttcactatgcaaaagaagtgtatcttgttataatttgattaatatcatacgaacactcatataatcgcgtggatatggcacgcaagtttctaccggtcaccgtaaatttccgactatgagtgagcaatggaacggctttattcggccgttgcgtgtagatcattcggcattgcttgctctttttttggagagcgggcaatgctttttttattttttataagcgggggtaatcattgtggaagcattaaaacgaaaaatagcagaagacggaattgttctttctgatcaagtgctgaaagtggattcttttttaaaccatcaaattgatccggttctcatgcagcagatcggccgggaatttgcgcgccgttttgaaaaagacgagataaccaaaatcgtcacaattgaatcttcgggcattgcccctgcggtgatggccggccttgaactcggcgttcccgtcatctttgcgagaaaaaggaagtctctcacattaacggatgatctgctgacggcatccgtctattctttcacgaaaaaaacagaaagtcagattgcaatctccggaaatcatctgtcgaaagatgaccgcgtgttaatcattgacgactttttagcgaacggacaggcggcagaaggacttttatccatcgtaaaacaagcaggcgcagcggtttgcgggatcggaatcgtcattgaaaagtcatttcagccgggaagagatgagctgatgaaaaaaggatgccgggtcgaatcactggcgagaattcaatcgcttgaagacggaaaagtgacatttgtacaggaggtccgttcatgaaaaacggctatgccaaaacactttcactcggtatccagcacgtgcttgccatgtatgccggcgccgtcgtcgttcccttaattgtaggagcggcattgggactgaacgcagaacagctgacatatctcgtatcaattgacatttttatgtgcggggcggctacgctgcttcaagtatggaggaataaatgtttcggcatcggcttacccgttgtgctcggctgtacgttcaccgcggtagcgccgattatttccatcggtaaggagtacgggatttcagccatttacgggagcattttggcatcgggtctgcttgtcattctgctgtcgtttttcttcggcaagctcgtatcctttttcccgcctgtggtaaccggatctgtcgtgacgattatcgggatgaccttaatgccggtcgcgatgaatcatattgccggcggggaaggcagcaaggatttcggtgatccggctaaccttgccctcggatttacggtgctcgtcatcatcgtgctgctttatcggtttacaaaaggatttttgaaatccatttcgattttaatcggcattgtcatcgggacggccatcgcatattttatgggaaaagtgcaatttgacaatgtggcgaatgctgacgcaattcaaatgattaaaccgttttacttcgggacgccgacatttcatgcggcaccgattattacgatgtccatcgttgccattgtcagccttgttgagtcaaccggcgtctatttcgctctcggtgacctgacaaaccggcgcctgtctgaacgtgatttagcaaaaggctaccgcgcggaaggcctggcggtattcatcagcggcatttttaatgcttttccgtacacggcttattcccaaaacgtcggcctcgtgcagctgacaggaattaagaaaaacgcggttatcggtgtcacgggcgcacttttaatgctcttcggcctttttccgaaaatcgcagccttcacgaccataatcccgtcttccgtactgggaggcgcgatggtggccatgttcggcatggtcatctcctacggcattaaaatgctcagtcaaattgactttaaaaagcaggaaaaccttctgattgtcgcgtgttcggtcggattgggactcggtgtaaccgtcgttcccgatatgtttaagcacctgccgtcttacttaaatctgctgaccacaaacggaatcgtcgccggaagctttaccgccgtccttttgaatattatttataatatgattcccaaaacgaaaaaaacccttgatgtgacaagggttcaagagggttagtgatccgttttctttaaaataacatcttattttatctagatcgaggatgcttccgaaagtttgctgaactttttgcgaggcatcctctttcatttattattttcattgtttgaatagaaacaaattgagtgatgaggcatccgccttatttcgccgaaaaaccgtcccgaactatatgtacgtgaacgagtatcttgtgcacgaattcttacaaaagagagtaaaagaagggaaagcccctgcttttaattaatccatccttcaaaagttgcgcgatagaacccttcgattatctctactttcttaaggtaatatgtaacaccattcttaacagttgtatttgggatatcccatctatgaaggtaatccattgtaaaagaatctctggtcgcttgtgtcgaaatttttgtttgagttgagtcgctatttgtatgaccagggctagatgcaaaagcaggggcagcggaaacgagtaaagcgagagacaaggcagaaccagttaaaactttttttaatttcattttgaacactcctttgttttttgatacacttgtattattacatacaatacaaaaagaaccaagggtttttttgttaatattttgtgagcgtgaatgtagttaggggagtggatggcgataggagcgatgctttcattcactgttgcggcttatttcagaatattgataagtatatagagaaaaagagttgaatattgctggcttctggtgagctgcagcctttgagtcagtgtttgctttagctattccagcgcttttccaacggggaaggtgcgatatgaaatttaacactgaaacaattgtacaaaagtaaaatctttatttaaaatgttataaatgcgaattttcaatataggaggttatctgatggcagaaaagaaaaaagctttaatcattgtggatgtacaaaaagcctttgatgataaaaagtggggagaccgaaataacgtaaaggcggaagaaaatatcagcaaaatactgaaattatggagagaaaaaggatggacagtcatatacatacaacatatttctgataaacctggttctttattttatccaaaaaatgagggggttgctataaaggaaatcgttaaacctatggaaaaagaagtcattataaccaaaaaagtaaacagcagctttattgggactaatctagaagagcttttaaaagcaaatgatataacaactgtcgtaatcactggcttgactacgccgcactgtgtttcaacaaccacaaggatgagcggtaatttaggatttgatacatacctgatttcagatgcaacagcagccttcggaatgagagatcaaaatgatacatattatgatgcagagactattcacaatatatctctggcaacattgcatgatgaatttgccacaatattaacgactgatcaattaatcaatgattttataaaaacaaactgactaacattatggctaagggcggcggtagggataggcggctgaaaagcatattcaggcgcatacaaggacctctcgaaaaatacggggattaccgactcttttcatcgtcgcaatatcgattgaaaaagccatctgcttcagatgctttttttgtttcttgtaaaccggttttgatcggcggttaacggtctgattcggcgaataacaaaaggctttactaatcagcgaattattcaagattttttggcttatgctgggtctggtgacttttgatttcctcgaatatattggcttgatcatctttttgaggctgaggctctttgttaagacattttggatcgatcacatttttaaggtctttgatggttaaaggcttacagtcatcttttaattcgtaacctaattgtccattagcttataaattggcatatttaattgtgtttatgtttgaaatgccaagaagtcttaaacgcatttcgagttgatctgctgtcagtctcagcttctttaagttttctgagttggccgtcttctataacgaatttaggttttccggttaaaaaagattcaaccagtttacttttacttgaaaccattccatcaaaatcaaagcgctaaaaaggatagacgcagcgattaatgttttcaataaactggtttctaaaatggggtgaacgataatcgtaccgattgaaatcatcaccattgtctgtgcaatggtcatttgtgctatggattttctccctgaaattctcagtaaaatcattccgaatgcaattataattaattcttcccaagcaaatctcatgttatcaccctgggttgtgttttatcaaaaataaaagagcaagtaagaggttttatggggtacttgctcacgaagaattattgcccttacatttaattttattcattttaggtgtttttctgatcggggatgtcctgcgcccctcgtccaaaagaaggtttgataactaaagaggggaggaaaaacattccatggccttttgtttacgtcagcatatatcaagaatagagttaccttaacatgagctggggaactcaagcgtccatagaaatgttctgaaggatctggattgattcttcgtaaagagttgaggctcggcttttggatagacatgtgattcactaaagtgctgcaggatccgatcaaaaaacctatggcaggagagaattttagattatgtgtttttgcgtctaaaagcagaaaacagtacaactgataatgatcatcgggtgaaatgaaattacgcaactaggtgctatatgtaggatcaattataaaaggcagtgaaactagaaaaaggggcaaagcccccttcatattagtaacagtgctcatcattcccataccagattccgttccagaaagaaacttcttttagataccaattgttcatatcctccagaagttgcaaaagcaggagattccgatacaagtagagcaagagataattcagaatctgtcacaattttcaattttgacacttcttaggtacatgttagcaatcatttattctcttatcggcacggtaacatacggattatttttagttgttgcttagaacaaacattccgcgtcatgaaaaatcagcttttgtagacggctgtccaagtgccatcagcaccatggaaggtgatgttgtctaaataataggtgattccattccggtaaattgaagtaggataatcaggtccggaaccattaagtatgaacgtcgccaaagcagatacttccttcgttttactttctgcagaaggtgtatcagcaggacctgcggcaaaagcaggggcggcagaacagagtaaagcgagtgatagggctgagccggctaaagctttcttcattttcattgtaaacactccttttcttttttaatacaattgtattattacatattatgttaaataagtacatgcttatctttgttaattttttgtgaacaaacagataatctatttaaacgcagagatgaaataagtatgatgatgaagcaattatcatctataaatataagatcaggaagtggctgattttctcaaaaatcatctgctcttgcgaaatggggagttgcatgacatttacggaacgggcggtagccattatcaaacagattcctgaaggaaaagtgatgacgtatggtcaaattgccgatcttgcgggaagtccgcagggagcgaggcaggttgtgaggattcttcactccatgagtaaaaagcatcgtcttccttggcacagggtcatcaatgcaaagggcgaaatcggattgagagacgaagagatgttttctgtacagaagctgtctcttgaagctgagggggtagcggtcacgtcagacggacggatcgatctcaatttatacctatatgatccgaatatgtaaaaaaacctgccgtatatcggcaggtttttcagttatatgctttgagccggccagaaaggttttgccggatataaggccattcctcccgaaggatggagtagtaggcggtatctctgagaccgccgtcgacagccggaatgtgtgcgcggcggatcccttcaaattgggctccgatccgcaaaatcgcagtccgtgagcgctggttgcgaacgtcggttttcagcgtcaccctgacagcttgccacacgtcaaacgcatgagtcagcatcagaagtttacattccgtattgacaccagtccgctgcacggcagaggcataccatgtgctgccaatctcacacacttccggagctgcgtccgccggccgcgtaaacacttccgcaaccataaaccgcgtgcttccgacgattcggtctgtttcaagactccgtactgcaaaaggcaatgcaagtcctttttcataatcggaaagcgcacgctcaatataacgctttgtttcttcgattccgtcagggacatgggtgtaagcataagtcgtcctattttctgaagctgcttcgcaaagtgcctgagagtgatcaatcgtcagcagctctaactgaacgagtgaccctttaagaatgacaggtgtcagcatcccaatcacaaccttttttatgaatggatcaagtatagccgaacggtttcttattcaaaagggccaatttcctattaaaatggcatgtcagtgaaatcctcgattcaaacttatgcatacattcaggaaaaaagcggaaacctttatgtaaagaggtgatgggcatggcatatgtgttatctgtcggaacgagcattccgaagtatcatgtctcgcaagaaacggcggcggattttgcgagagggatgtttgccgattcatttaaggatattgatcggctgttaaaagcctttcaaaacggcgaaattgaatcaaggcagtttgtccggccgattgaatggtataaaacggcacggggtttttcagaaaaaaaccggctgtatacggaagaaaccgtcaagcacagtgcggatgcggcacttgattgtttaacaaacccggattgtttaacaaatccctttccatatgaaaaagtggatgcgatcttttttatttccagcaccgggctttcgacacccagcattgaagcgaaagtgatgaatcagcttccgttttctgcgaaaacaaaacggataccgatctggggcttaggatgcgcgggcggagcggccggcctgtccagggcgtacgaatactgccgcgcgtatcctgaagcatacgtgcttgtcatcgcggctgaactctgcagcttaacgtttcagccgaacgacaagtcaaaaagcaacttaatcggaacttccctgtttgcggacgggattgccgcagtactaatgggaggagaaaaggcgaaccgaaacgacgtcaaacagccgcttcttccgcggatattcgccactcaatcggtgatgatgccggatgcggaagatgtgatgggctgggaattcaccgacagcggttttcaagtcattttttcaagagacattcctaccctggtttcacagtggctgaaggacaatgttgatgaatttttatttgaatatggtgtcagtactcacgacattaaaacctttcttgcccatccaggcgggaaaaaggtcattgacgcctatttaacgagtctttcaatgggcaccgggcagcttgcggcatctcggaaggtgctgcaaaaacacgggaacatgtcttccgcaactatttttcatgtgataaaagaacagttgctcaacggacggcagaaagaaaacgaaaaagggctgatcggcgctctcgggccgggattttcgtctgagcttttgctgttcagctgggaaaagggggcttcttaatgttttggctgtttatcatgctggttgcggcccagcggattgcggagatgatcgtggcccggcgcaatgagcaaaaggtgaaaaagcaaggcgcagtcgaatacggagaaggacattatccctttctcgtcctgatgcacgtgctctttttcgtctctcttacagctgaggtggcggcgtttcaaaaaacgctttctccaaggtgggccgccattatatgtattattttatttgtacaggggatcaggtattgggctctattatcattagggcggtattggaatacgaaaatccttgtcgtgccggatgcggagcttgtcagaaaggggccgtacaggtggatgaagcacccgaactacgcggtcgtcatcttagaatttatttttctgccgctgttatacggagcgtattggacactgtttctcttttcgattctcaatgcctgcatgctcactgtgaggattcgcgccgaagagaaagcgctagaagaaaacaccgcaaaatagagattgaaaatcattctcactcatgataagatgtaaatatgaaaatgattctcattcaaggtggtgccgaaaatgacaatgttatttttatttgcagccgtttgtacatacagtgttttaattggtttcgtattgaaaaaagtttcgaataaatcgatgtcttcttaaacatctgcggtttttcctgccgcgggtgttttttctttatcagctgccgatatcggcggcttttttgcgtttcctgaagaaaagtgagccattcttgtgtaaaatgggggagaggtttttttcagagctttctaaaaatgaaaaacgtcatttgatgcgacagacacaaaggggtaaagacacatgacagaagaagaacgccataacagggagattttcagcagaacgggtgccttatacgcacaatttttggatcatcaggatgaaaaacgggccgatcagctcgcggccattatgaaaaaagcggctgatgaagaggtttatatcgcgtttaccgggcattattcggccggaaagtcctctttattaaacacattgctcggtgaagacatactgccgacaagcccgattcccacaagcgccaacctcgttgtcatccggcacggtgaagataaagtcgtgcttcatacgacggacggggcttatgcagagatcaaaggaagttacgataaagaacaagtgcagcaattctgtaaagacggtgagcaaattgaaacggtggaagtctatgccggctttaaggagtcagagccttatgcggcctacattgacacaccgggaattgattcgacggacgaagcgcattttttatctgccgcttcagttctccatcaggctgacgctttattttacgtcgttcattataatcacgtccattcagaagaaaatatgctgtttctcagctccatcaaagaccgtattccgaatttgtttctgatcgtcaaccaaattgacagacatgatgaaactgaaacgaagtttgaagagtaccgcaggcaggtggaagacatgcttgaaggcgcgggaataccgaaagaatcgcttttctttacgtctgtcactgagcctgaccatcctttaaacggcatggaacagctgaaaaaacatctgcagaagctgaaacagcaggcaaaaacaaatttatggtccttaacggagagaaaagtcgcacacttagtcaaagagcatacagagatgctcgtaaaagaagataaaaacggcagcggagagcagtttgacaaacaagaagcacttgtccgttctgttgaagatgagcttaaaaaagccgttcaacaggctgaaacagcagagaaagacatcagaaaagacgtgcagaacatattgcaaaacgctaatctgacaccctttgagatgagggtgcttgcatctgcttatattgaatcacagcagccatcatttaaaaccggattattcttttcaaaagcgaaaacagcttcggaaaaagaaagaaggcatgctgaattttttgccgatattaaaaaaagaacggaaggggaagcggattggcatattatcgacacatttacgaaagcggccaagcggtatgaagcggattcggacgaactgatcaagaaaatccaggcgtaccgcacaccgctttctgatgatatcaccgctcaggcccttaagcagggagcggccttttcatctgaatacgtattaacttatacgaaagacctcgctgaaatgatcagaagggaagccaaaagacagacagcggaactcattgaggagctgaccgcttatgttcagacaaaaaacggaccgctcattgagaacttgaaaaaccggctcgaaaaagaaaagaaaataagggatgagctcgcgcaatcggcaaaagaagaacgcaatgccttggaaaaagcagcccgcgtccgcgctttgtgggaagaagaattgacctgtgatacgggaagcggcgactggtatacgcgaaaaaaacgccttgcaaaagcgcccgtccaaaagaaaccaaaagaggctgtacagcatgaagtaagcaagcccgaaaaaaatgcgatgaaggaacttcctataaaagagcagactgatcggttctatgagcttgccgggattcttgaatcctcgagcatattaggaaaacaggcagaagcctttcgaagcaggattgagcggcttgaaaaccgccagtttaccttggcgttattcggcggattcagttccggtaaatcatcatttgcaaatgcgcttgtcggtgaatacgtgctgccatcatcaccgacgcccacaacggctacgatcaacaaaataacgaaaccgcaagacggcaaaccgcataaatctgcggagatcgtttttaaaacggaggaggagctggacgctgaaatgcttcagctgactgagctgaaagacgctgatgtaaaggggcgttcactgaaagagagatggaattatgccattaaaaagggaaaaattccggatgaactcatcccggtgattcagacgatgctgcaggcgtttgatacgtacgaagaacagatccgtcaaaggctgacactgacggtgccggttgaagatttaaaaccgtacgcagccgaagaaaaaacggcctgctgcgtaaaagaagtcaccgtgtattatgattcgcctctcacgcaaaaaggcatcaccattgttgatacgccgggagcaagcagtataaacaagcgccatacggaacttgcctttcaatatataaaagatgctgacgcgttcttttatatgacgtactatcagcattctttttcaaaaggagacaggtcttttctgaagaaactcggcctcgtcaaagaatcattcggcatggataaaatgttttttgtcattaacgccgccgatctggccaaaaccgaaagcgagctggaaaccgtcaaagactatgtccgctcagaactctcaaaagagggaattaaccggccgaaattatatcatgtttcaagtaaagaagagcttgcgggtaaaaaagaagctttttataacaggttctctgatgtaagaaccgggcttgagcactttattgaggaagatgtaatgagggccagctgcgcccagctgaaaacagaggcgggcaaattgtgcgatatggtggaacagcttcacgaatctcttcaccagtcggcagaagaaaaagagaaaaagaaacagcgtctggagtcttcctatgaaaaagctctcgctgacatttcaaagcgccgtacgtctgaggtcatcattcgaaaagtgatgaaagatacgaaagaacagctctatcacattaaacatcgcctgacgttttatgcgaatgatatgctgaaaaccgccttccatccgggtcttcaaaacggtgattggaaacaaaatatatcagcggcgctgaatgaagcgctcaaggaattccgttttgaatatattcaagagctgaaaacgctcgatatccggatgaccggttttattgagcgtcatatgactgaggaatggatggaaaactgtcagaagaagcttatggaagacggaaatttctccatttatgtgagcggtgaaaacgaatttgccgttcagctgaaagaggtcgctccggtcattgacgtctcggcattctcacatcacgtaaaggaagttaaatcaccgaagcagttttttgaacagaacggaaaagcagcgtttgtagaagggctcaggctcagcctgcaaaaagtgacagaaaagtggcttgagcaggagaaagaaagcctttcagagcgatatgctgagcaggtgcgccgtctgcaagaagacatggcggataaaagcctgtcccagatccgcgagcagcgggacacttatttacaaggtcttgcggaaaatacgagtgcaagggaaattgaacacctttacgaagccgaaaaagcatggaaaaagaaagatgaaatgctgaaaatttaaaaatccggttggcgggcagataacagtcatggtagactaaaatgaaaaaaagcgagatgaaaccttttatgtcagaagtccataaagcaatttcagcacattccgcaaaacagcatcagcacgtcaaaacatttgtacagcttgattatgagcgtgaacaggccattgaagaagcaattgtaaaatgcagacagaataaaccgttcacgacagatgccatcaatggcatcaccgcaaaaatgaaccagctggcgaaaaagggcatcgtgccgcaaagacgattcgtaagtgaagagatggtgaaagaattcgtcagcagacagtaatggatgaacctgccgcgtgtgtcatcagcgcttgctgtacatactatccgtatcttctctaaagggggatatgaccatgggcagaacaaaactgggaaacagaaatgctcagcagaataacaatgccaaaaagaaaaacggcttcggacagaaatttgattcttatgccggccgtgaagctgaaaagctgatggcaagcaataaaagacacggtgaataacgtgacggcagcatcttccaaatggggggatgctgtttttttaccgccttctttggtaaaataggaacattgaataaaaaggagtttcgatatatgaataataaattactgctcgttgacggcatggcgcttttgttccgctcgtttttcgcgacggccgttcatcgcaattttatgataaatgaaaacggaattcccacaaacggcgtcaacggttttttaaagcatcttattacggcggttgatacgtttcagcccacacatgtcgtctgctgctgggatatgggaagcaaaacgtaccgcaatgatttgtttcaagattataaggccaacagaagtgaaccgccgctagagctgattccgcaatttgatctagcgaaagaagcagcgcgagagctcggttttttaaacatcggcataaaaggctatgaggcggatgactgtatcggtacgctttctgccctattttccggggaagcggaaattacgattgtaacgggtgataaagatctgcttcaattgctgaatcatcaagttcgagtagcgctgctgcaaaagggtatcggcaattataaggtatatacagatgagatattcagagaagaaacgggagttccgccaaaagcgctgattgacattaaggcgctgatgggagacacgagcgataactatcccggcgttaaagggatcggggaaaaaacggcgtacaagctgatccgtgaatatcaaaacatagaccggttattagaaagcctcgctctcttgccgaagggccagcaaacgaaaattcagcaaagcttgaaagaattggagctgtcaaggcagcttgctgaaatacattgcgaggtgccgttagtctgtacgcttgaagaagcgcttttttcattaaagatggaagaggctgcattaatgctgagacgtcatcagataaaaggaattgaaaggatgctcgaaaagctgaacgccagagagataagctgatccctctagcgttttgtattgcttttttttgcgttgttttcaagggctgatttcgggtctttatgcgcatttccttccatatttccctgaggattcacgcccccggtcagctggcctttattttcttttctcatagctgttcacctcatttgtaggatgaacagtgagacgcaatttcattccggttatttattcagccgaatcgctttttttgcaagctgatcggctgtttggttttgtctgccgggaatccacttaatgaaaaacaatggaaatccggactttaagcggatgatttcgtcaacaaacggctggaaagccttgtttttaaccgcttcaagatctgcggcccgctccacgatatccgaatccgtccggaatgacacggactcatatccgcgggcggcacacagcttcattccttcaattaaagcgagaaattcagcttcctgatttgattggtcgccgatcggaattgagaaagattctgttttcccgtcatgtttaataaaaataccgataccggacgggcccgggtttccggcgcttgcaccgtctacataaatttcagcgggcatcatccgtcactctccattcggtgtcattcgttttgccgcatacgcataagggacagaaatgagtgataccgcaaatttaatcaggtaagttgaaatgaagatgctgaaccatactcccgcggaataaacgccgataaaggccacggcagtgaagataaatgtatccagcagctggctgagcgccgtgcttccgctgtttctgagccagagaagcctgtctgaaggaaagattctccgaatggctgaatatacataaacatctatcgtttggctgaaaataaaagccaagaggcttccgagcgcaacacgcggcagaaaaccgaaaatcgtctcaagggcaggctgtgcgatatctgatgcagccggtttatataaaagagccccctgcatggcgcatgtcaaagcgagtagagtggaaaacccgagccagacggctttgcgcgcttccctgggaccgtatttttcattcagcacatccgttgcgaagaaaacggtgccgtacatgatatttcccagtgtcgccgtaagcccgaacagctcgactgttttgacaacctgcaagttggcgcacaccgtggcgaaaccgatccatacgaataggcccgttttgccaaatcctttataaaacagaagaacaatgataaaatgaatgaccgcaaataagatccataacacatcgttaaacaaaacctgctgacttcctttcaatttgagaatggtttgattatagcacacgcccgtcaactaatgaatggtaaggtgatttcaatgaatcttaagccgtatatcgaaatagaagcaaaaggaacaggccctgtcgcgtttttttccgaagattggctgaccgttccgaaagcgcgcatgcttgcaagagaagtcagccgctttccttatataaaagacatttattttgaggatgaaaaaggcgcgagctggacgcttaaagaattagaaaagcttactgaagagcttgcgcacgaacctgacgacattacagtgtatttcgacggcggctttgacaaaacaagcggacgcgccggactcggaattgtcgtgtattattctctcggcggcaagcgataccgcatacggaaaaacaaaagcttaacgcttcagacgaacaatgaggcggaatatgccgctttatacgaagcgcttaaggaagtgcaggaacttggcgcaagcagaaattcaatcacgataagaggggattccctcgtcgttttgcatcagcttgacggcagctggccgtgttatgatgaaacgcaaaacgaatggctggataaaattgaagcgctgctcgaatccttaaagctgacaccgacatatgaagccgtaagccgaaaggaaaatcaagaagcggatgaccttgccagaaaaattctctcggaccggcagattgaaagccgcataacattagaaggtaacggagatgactgatattggataaaaaaagcatttataaagaattgacagagcttcaggatgaatattgcaaagactgtttcgtaaaaaagcatttccgcaaagagtttggaaaaacgcacgctcattctttctgcatcaaccaatgcacagtgggggagaagctgaaagcctacggcaaggtgctgacaaatcaataaaaaataaaaccgcagcttctgcggttttatttttcgaattcatcgagctgatgctggcaatcgtcgagaagcattcgctgcttttgcagaaaaccctggtcgagagcttgcagttcactggattgtgacatcgttctggcatcctgaatcgcttggtaagcagattccaccaaagttgaattttggccccgggtagccgctcccgttgttttctgggccgtttccaccgctaattcaagctggcgtttatccgtcagtccgtttggaaaaaattcagagtccattaaaaaacacctccgcaaatagtttggagattttttttagaaatatgtacggaaaatagaaaaaaatatagaaaataagccgatataactattgaacctgattaattagggcttatttactattattcagggtatcttgggagagaagggaaaaaccagccgtgaatgataaagatttaaaaacaatccttcagcagacatttaaagaaatatacggtgatttgggaagtttagcggaaatggcaaaaaaaggaatgccgtcaatggagaaacaaattgaagaaatcgagcagcgctgcaagcagaatcttgttgcaattgagattcagacggcaatcaaataggagaggcatacgcctctcctctatttgtcatctgatcaacatgtattgagtttagagttttacaacattagaagcttgaggtccacgattaccttcgacaatttcaaaagaaacttcttgtccttcttctaatgatttgtatccttctccttcgatagcagtgaagtgaacaaatacgtcgtctccgccttcaacttcgatgaagccgaatcctttttcgttattgaaccattttactttaccgttttgcatattgcttaattcctcctagtactgtagcaccttcgtgctaaaaaaaattttgtcatcatccaaccgtacgtatgtaaacgttgttaaatgatggttcaactatacaccatatgggagcggacgtcaagcagccgctccctattttttatctttatttttccagtcacaaagcttaaccggaaaaaaacaaaaagcacacgaatcgttcgtgtgcttttcttttacgataatgccatatctgccttcccggccatcatttcagattcttttataatgtcctgcaaaatgacttcagaagagttggggaggtgaaggcttttaatattgtccttcatccggttcagcttctcctcatccgcaagaagggaggtgaccgactctaaaatttcttcgtggcggttgaccacgacagccgcaccgcgatcttcaaagaaaatggcgttttctttttcctgtccgggaaccggtttgtacaaaataacgggtactccgatcgccgttgcttccgtcagtgtgatgccgcccggtttcgtgatcatgcagtctgtaatacggaacagctcgtcaattctttctacatagcccagaactttcagccggtcggcattgtcaccttccaagctgctgagggattctttcagcgagctgtttttgccgcataccaccacaacctgcacctgatcgtcatgaacgagattttcgcacagttcttttacgtttttcagcacaccatgcgctcccgccataataagaagaacttttttgtcgggagagagattgtattttttataaatcggctctttcggcatcgattcctcgaattgaggcctgatgggaatgcccgtgatctttacgttgttcgggtgagtgccgatttcaatcagtttttccttcacgtaatctgtggcgacataatatttatcaacattttcatgaacccagattttgtgaaggcagaaatcggtcataacgttgaacgtcgggatcacttttccggttctccgtctgtattccggtacgacaatcatcggaaatgtattgataataatgtccggcttatgctcttcgacgagctggcctaaacgtttatttcccattttaaaataaatattgaatttgcgtttattatagattttgtcaactccgtaataaaacaaacgataaaactgtttcccgattgagaagctttttaaataaaggtattgagtaacctctgaaacaatcggatttgactcttgatacaaattggaaaccgtcacatctaagccgagacgcagacactgttcgtagagcgttttggccacttgaacatgcccgtttccgtaatttgcagtcaaaattaatacttttttattggtattcaagtaaattcacctcaatgtaatcaacaacaagcaagcttcatgcatcgtaaggagttattgtctatagataaacataacacaagtgcatcattttataataagcgcggcaacatatttaaactaaatttaattgatatgttccattattttaaagttttgttatacgcatactgaatcaagagtattttatcatatttttgtcaccgtatcactcaaaacaaaaattaatcccattcatacggggtttcctgatatacgtaataattcagccaattcataaacaataacgttgcatgagctttccagcggttaacaggttctttcccgccgggcgcaaaatagtgcttaggagcttctacgtttgaaagatttctctctatgtctctctcatactcctgaagtagcgtatcggtatcatattccggatgacccgttaagaaaatctgtttttcgtcttttgaaacgattaaacagacccccgcttcctctgaaacgctgagcacatccagatccgaagccgattgcagctgctccgtattaatatctgtatgccgtgagtggggcacatagtatagctcgtcaaatcctcttaccaatctctcatgttttttaagaacggtatgctcaaacacaccgaagatttttttcggcagctccactttctcaatgccgtaatgatagtataaaccggcttgagcgccccagcagatatggagggttgaagtgacattcgttttgctccattccatgatttccttcaattcttcccagtaagaaacatcttcaaacggcaggtgctcaatcggagccccggtaataatcattccgtcaaaccgtttgtggcgaatgctggaaaaatccgtataaaactcatccagatgctgccttgccgtattttttggagtatgtgtgctcggaattaagaacgtaaagtgaacttgtaaaggtgaattcccaagcatcctgaggagctgggtttccgtttggatttttttcggcatcagatttaaaatcacgatcttctgcggccggatatcctgatgaaaagcccggctttcatccattacaaagatgtgttcactttcaagcacctgcttagcgggcaggtgatttggtatattaataggcaacatgccacctccgttattccccgttaattttcttcattatagaaatttttaagccatttttcaatccatcccggcgtaataaaccgcatttaacgcataatgacggggataaaagcggcaaataggcataaattcggagcggctctttattatgacgggtaaagagccgtttggttcctcgaaaaaaacgttttccgttaagtggaaggaaaaagcggttgccgtttgttttgcagtgtaaaacaggtaaaataaatgaagaatgtaaaaaggagggccgcagatgacaatttacgatataaacgtacggaccataacaggcgaagacatgacgctatcggcttacagaggcaaggtgatgatcattgtgaatacagcaagcaaatgcgggttcacatcccagctcaagcagcttcaggagctctatgatacatatcgggaggaaggtcttgaaatattgggatttccctgcaaccaattcatgaaccaagaacctggaaacgaagcggaaattcaagatttctgtgtgaaaaactacggagtcacattcccgatgtttgcgaaagttgatgtcaatggagcagacgctcatcctctcttcacatatctgacggaacaggcgaaggggatgctcggcacaaaagcggtcaaatggaatttcactaagtttatcgtggaccgaaacggtgaagtcaccgggcgtttttcaccgaacgtcaacccaaaagagcttgaagatacggtgcagaggcttttggcccgataagaggtgatacgatgaacgaaaaagagcagctggaaagcgtcaggaattgggtcagagaaaagcttatcaatgaacgaacgggccatgactggcttcatatttcccgggtcgcaaaactttctgtgtacattgcaaaagaagaaggcgccgacttatttatcactgagacggccgcgctggttcatgatctgattgacgccaagctcgaaaaaagcgaaaggctgacggcaggcgaagtgacagaacggctggctgctttcaacattgcggatggctccattcaggagatcgcggatattatcacgagaatgtcattcagacacagggaactgctgataaagcggccgctttcattggaggggaaagttgttcaggatgcagacatgcttgatgcgatcggcgcagcgggcatcggcagggcttttatgtttgccggggcgaagggtcacccgatgtacggaactcaaacaagtgtgctggcccatatagaggataaattaatcaagcttaaaggcttaatgaatacaaaagcgggggccggtttagcagaggagcggcatcaatttcttttgcagttcgccgcccgtatccaaaaagaggccggcatttgcaaaagctaagcggcgcaatagaacgcttgtgccgactatgttagaataagtgtcagattgcgcataggaggaccgatatgaagattaaatcaatagaaccgacgccgagtccgaacacgatgaaagtgattttgactgaagagcttccggcagggaaaagcaacaattacaagcccggtcaggcaggtgatgctccggctgtcgtacgtgatattttaaacatcgaaggagtaaagggcgtttatcacgttgccgatttcctggctgtggagagaaacgcccgttttgactggaaggaaattctgcctcaggtccgttccgccttcggaatggaacatacggagcagtctgagagccgttctgaacaggaatcgttcggtgaagtgaaggttttcgtacaaatgttcagcggaatcccgatgcaggtcaaattgacggacggcgaacgtgaagagcgcttcggccttccggaacgtttccaagaagccatcttaaagctgcgttccgaagcttcaaatgttgtatttgagcgggcttggaaagaacaaggcgtgcgcttcggggattttaccgaaatcggacacgatgtcacagaagagcttcaggccgcctacagtgatgagcggctcaaacgcctgacagaagcagccgcacagcaaaagggtgaggccaaacctgcagtgcagcggaaagcttataaagtgactttggacatgctcgatgatgaagactggaaacagcgctatgcccatcttgagcaaatggatccggatgaagacgatttaccagtattggaaaaggcgctgtatgatccgaagacttcgatcagaagacaagccgtcgtttatttgggaatgatcgaaaagccgtctgtgcttccgctgttatacaaagcgcttgaagacaaaacggtgacggtcagaaggacggcgggtgactgtctgtcggatcttggcgatgcgagcgccatcccggccatgacgaaatcgctcagtgactcaagcaagctcgtgcgctggcgcgcggccatgtttttatatgaggtcggcgatgaaagcgcgctggaagcattaaaagcggcggaagacgatccggaattcgaagtcagcctgcaagtcaaaatggcgattgaacggattgagcacggagaagaggcgaaaggttcagtctggaaacagatgactgaaagcagaaaaaaagaacagttataacaaaaaggtgcgcccatgcaccttttttatttgaattcactttttataaaaattatttagaatattgttgaaaaatgattcaaaactctatatagtaagtacaatattaattgttggagggtttttatcgaaatacagaaagaatagaaaagcgagacagggcaaagacactgtaaaatttgcagaacgcgccctagaataaactgaaaattttaaaaatagtgcacagtctaaaaacagtagggggatcaccatggcagaattacgcagcaacatgatcacacagggaattgacagagcgccgcaccgcagccttcttcgcgctgccggcgtaaaagaagaggacttcggtaagccgtttatcgcggtctgtaattcatacatcgatatcgttcccgggcatgttcacctgcaggaatttggaaaaatcgtaaaagaagcaatcagggaagcgggcggtgtgccttttgaatttaacacgatcggagtagatgacggaatcgcaatggggcatatcggcatgagatattcgctgccgagccgcgaaatcattgccgattcagttgaaacggtcgtctcggcgcactggtttgacggaatggtctgcattccgaactgcgacaaaattacgccgggaatgctgatggcggctatgcggattaatattccgaccatttttgtcagcggggggccgatggcagccggccgtacaagcgacggccgcaaaatttcgctttcttcagtatttgaaggcgtcggcgcatatcaagccgggaaaatcggtgaaagcgacctgcaggagctggaacagttcggctgcccgacgtgcggatcttgttcgggcatgtttacggcaaactccatgaactgtctgtctgaagcgctcggtctggcgcttccgggcaacggaacaattcttgcaacttcaccggaaagaagagagtttgtgagaaaatcagcggcccaattgatggagaccatcaaaaaagacattaagccgcgcgatatcgtcaccgaaaaagcgattgacaacgcatttgcgttagacatggctctcggcggctcaaccaacacagtgctacatacgcttgcgcttgccaatgaagctggggttgagtactctttagaacgcattaacgaagtggctgaacgagtgcctcacttatcgaaattggcgccggcctcggacgtcttcattgaagatctgcacgaagcgggcggagtctcggcggcccttaatgaattagcgaaaaaagaaggggcgcttcatcttgacgcgctgactgtaacaggccgcacactcggagaaacaattgcgggtcatgaagtaaaggattatgacgtgattcatccgcttgacaatccgtttaccgaaaaaggcggtttggccgtcctgtttgggaatctggctccggacggcgccattatcaaaacaggcggcgtacaggacgggattacaagacatgaaggtcccgctgtcgtctttgattcccaggatgccgcgcttgaaggcattataaaccgcaaagtaaaagaaggagatgttgtcattatccgttatgaagggccaaagggcggcccgggcatgccggagatgctcgctccgacgtctcagattgtcggaatggggcttggcccgaaagtggcgcttattacagacggccgtttttcaggagcgtcccggggcctttcaatcgggcacgtatcgcctgaagcggctgaaggcggcccgctcgcattcgtagaaaacggcgaccatgtcatcgttgacatagaaaaacggattttggacgtacaagtgcctgaagaagaatgggaaaaacgcaaggccgaatggataggcttcgagccgaaagtaaaaacaggatatctggcccggtattccaaactcgtaacaagcgccaatacgggcggaatcatgaaaatataaaacagaggcctgaacaattgaattccggccccctctatagtatccttgacttcatataaggattttagagggggcttttttatgtcaatggcttatgaagaatatatgcgccagctggtcgtgccgatgcgccgtgagctgacgggtgcgggttttcaggaattaacgactgctgaagaagtagaaagctttatggaacaggcagagggcacgacattggtcgttgtcaactccgtgtgcggctgtgcagcaggtcttgcccgtccggctgcgactcaggctgttttacagcatgaaaaagcgcctgatcatacggttaccgtatttgccggtcaagataaagacgcaactgcaaaaatgcgtgaatattttacggggcaggaaccttcctcgccttcaatggcgctgttaaaagggaaagaggtcgttcattttattccccgccacgaaatcgaagggcatgacatggaggaaattatgaaaaatctgacggatgccttcgatgcgcactgctgaaatgcccgaattccgggcattttctttttggagaaaaagatgatcacaacgagttacagaccaagcgaatatacgatacacacagcgcagtcgctcagtgtcaagctgggtgacacttactgcagccgcaataaacagcccattgaaaaaatgctggaacgagcggctagcgatcttttagtcatcggaaaggaacggttcgaactttacacgaagcaaggggagaagttcttttttcacccgaatacagcgatgttccgcgcaaagcggtttttgagaggggaagccgagccgttgttaaaagcagccggattacgcgaaggggattcctttttagattgtacgctcggcctggcatccgatgcgattttggcaagcctggcagtcggaaaaagcggacaagtcatcggcctggagaaaaacaagcttgtctcattgcttgttgaaacaggacttcaaacgtgggaaaccggaatggaggagctccaaaccgccatgaaacgcattcatgtcaaacatgccgactgcgccgattatttgcgggagcttcctgattcatcggtagatgtcatttattttgacccgatgtttcacgaacctgttgaaacgtcagacggcattgcaccgctccgcgcgctggcagaagagggttttaacgaagagtgcatcacgcaagccgtccgggcggcgaaaaaatgcgtagtgcttaaagaccattggaaaagcccgcggtttgaacgatacggcttcaaggtgctgaaaagaaagacggcgcttttccacttcggtgtcatccatgtaagctcatgatatcatgggcttctttttcgttaatcagtgatttccataacgacaaaatatagcagcgtgagaagtgatactgtcgcaaataaagcgttaatcatctcatcccctcctttttctccttcttattgtaagcggtttatccgatcggtcacagttaccaatttcccatattgcatgataatacgctgccggacatgacgccgcgctttcatctatgctaaaataaaggaaaagaggacaataaaacagaggggaacaatctgtcatgaaattgtggatgaaaaagacccttgtggttctgtttaccattgtaacgttcggactcgtgtctcctccggctgctttgatgacagacaagccttcaggacagtcgagcagtcttgagcagaatgattacaccgctttttatgatgaacacaccctgccgggagaagagaaggcagggcgggagcctgaattactgtttcaatcgtatcagcagcagcttctcggtgatgctgaaaatcaatcatttttaaaattcggctgcaaaatttctccggtcattgaagatgattacagaagtgaaattctgccgaaaattgaagatgtgatcacaggacatttagccaagtttcaagatgatgaagcgtatcaggatgtggttatttccagcaaaccgtcggccggaaaaactgaaaaaatttttcatgtgtataacaggctgacgggtgaagatcttttaaggttccacgtccgccgggatcatcctccgcaagacggctactggtttaattttcattaccataccgctgaagacggatttcagtcacatcatgagctcggcagcatttactgggaccgcaatacgccgcctgactggatgagcgtgtaatagcgagaagaaataaaaaaatcatttctgagaaattttgcagaaatgattttttattgtgttacactactaaaagactactttaaaaggatgaaaaaaaatgaaacaatataaagatttgtgccgtcatgtgttagaaaacggagaaaaaaaaggagaccgtacgggaacgggtacgatcagcacgttcggctaccaaatgcggtttaaccttcaggaaggtttcccgatgcttacgacgaaaaagctccattttaaatccatcgcgcatgagctgctttggtttttaaaaggagatacgaatgtccgctaccttcaggataacggagtccgcatctggaacgaatgggcggatgaaaacggagagctcggaccggtttacggttctcaatggcgttcatggcgcggagcggacggcgagaccatcgatcaaatctcccggctgattcatgacatcaagacaaacccgaattccagacgtttaatcgtcagcgcctggaatgtcggcgaaattgatcatatggcgcttccgccttgccactgcctgtttcagttttatgtcgcggacggaaaactgtcgtgtcagctttatcagcgctcagcggatgtctttctcggcgtgccgtttaatattgcgtcttatgcgcttttaacaatgatgatcgcgcatgtgacggggcttgaaccgggtgagtttgttcatacattcggagacgtccacatttaccaaaaccatgtggagcaggtgaatttgcagctgacaagggatgtccgtccgctgccgaaactgcggtttgcgcgaaatgttgattctatttttgattttacgtttgaagactttatcattgaggattatgacccgcatccgcacataaaaggagctgtcagcgtatgatttcgtttatttttgcgatggatgaaaaccggctgatcgggaaagataacgatctgccttggcaccttcccgatgatctcgcatatttcaaaaaagtgacgacgggccacaccattgtaatggggcggaaaacgtttgaatcaatcggacgcccgcttccgaaccggcgtaacatcgttgtaacctcacgggacgaatctttattcccgggctgtattaccgccgactcggctgaggaagtgctcaagctgatcccggcggatgaagaatgctttgtgatcggcggcgcccagctgtacagtgcgctctttccttatgcggacagactctacatgacaaaaattcaccatgtctttgaaggagaccgtttttttccggaatttaatgaagctgaatgggaattgacatcccgcaaacagggagtaaaagatgaaaaaaacccttacgattatgagtaccttgtatacgagaaagtttaagcagggggacaagaattgattcgttacggctgccttgtgatgtacgttgtatttatgttcatgaaaaatattcaggaatatatcaatcaaaaagagcttgacccgcggctttcttttcaaaaacagatgaggctggtgtatgagcggccgaaagcctttatgagaggctgcattgacgtgtcgggatcggcaatcggcattcatcatgatcagccgataccggacggccccgtattgtatgtgcatcccagattgcgcccggctgatcttctgctgcttgcgggacatcttgaagagccggctggttttatcgctggcgagaaagctttccggatgccgtttctcggaaattggctgcggctgatgggtgtcatttgtggcggagacagccgggatgcagtgcttcatgaggcggaagtccgtctgcaaaaagggcaaagtctgattctgtccgaagacggcaaaatcaatccggaggaactggcccttcgtttcgacctcccgattgtgcctgtcagcacttcgggaacagaccggctgctgcggggcagattactgaaacggctgaaaccggctgacattgaattacatataaagcccgcttattttccggccggtcagaaacggctccgtgcataaaaaaagcacagtctctatagagaggctgtgctttttatttcagataaaggggactttgacgcaataaaataaaatacagaaaaacatcgaggcgctgccgcctaaaacaaaactgtgccaaatggcgtgatgatacggaacctttctccaaatataaaatattgtgccggcggaatacaataaaccgccgaaaagaagaaggccgaaaccggggcctgacagcgaagcgtacagcggtttaatggcgacgatgatcagccagcccatcattaaatagacaagcgttgaaaaaatgataaaccgcttcacgaaaaagattttaaacacgatgcctccgatggcaagcgaccaaacaataattaaaagggtcagaccgagcgcccctttaaggggtcctaataaaaatggcgtatatgttccggctattaatacgtatatcgcggaatgatccacaatctcaagaatgtctttcgtttttttatgctgaatgctgtgcaaaagagtcgagctgagatacagcagcagcattgaagcgccgaagattgaaaagctgacgatgtctgtcggcgagccgtatttcaccgcgaagataatgagaaaaataagcgccggaatcgacagcaatacaccgattccgtgtgtgacggcatttgcgatttcttcttttattgtgaacaatcaaatgtcctcctttttaaaggatttgtttttgcagtgactgcaaaaagctcaacccttctaatgtaatttttgttccagcgcgtcctcggccttttgtcacatagttcatcttttctaagtaatcaagcctgtttctgacctgctggggcgataatgtcattgtgctgttttcgcttaattcggatatgctccgtctgctggcgggttcgccttttgtatttaagtctttaattgattccaaaataaacaaaaactcttctttctccatcaatgtcagccgtttttcttttttcttagctgttttcgctttctggctgtttttgatatacagcgggacatcatcgggataaatcgtgctgccggatgctgccgcggccatatagtacgccgcattttgaagttctctgatgttgccgttaaaggtgtgccgctcaaacagcggataaacggacggatcgatatgaacatgctgccccgtggctgtcagcatatgctgcagaagaagcggtatatcgctttttcgttcagataaagcagggagcggaaggcataacacgtgaagcctgtaaaataaatcttggctgaacgtattttctgcgccggtatcaccaagatccgccgtgctgcttgcaatgatgcgggcggaaagcccggcatccagctcggaaagaaggcgggcctgtaccgagagcggcatgtctccgatttcatataagaataatgttccgcggcgggccctgtttaatgcgccttcagcgccgaacagttcatattcgagccgctcttcgctttggctgcagtgaacggtaataaatagttcgctgtttctgcgggatttatggtggatcgctctggccatttgtttttttccggttccgacttcacccgttatgaagactggcaaatcagataaagcaaattgcgaggccaatcgtttcgcttctgaaaaggtgtgatgttcgccggctagctgataaaaaggatcagtttgttcaattacactcatgaattggctccttttggttctaattggtttaagtataacacgtttgtgcgatcgaaaatatctttttctcttgtatcggttcatttaattttatttacaaaattaaaataattgtcttattatttgaatattcatgttataatggcatattaaatagggatttaaataagaaaggactctgtaaatgaaaccgttgcttaaagaagactctctcatccaggtaaaagacattttaaaagcgcaccaaaatgtaaaggacgttgtgatacatacgcctttgcagaggaatgacagactttctgagaggtatggctgcaacatctatttgaaaagggaagacctgcaggtggtcagatcatttaagctcagaggggcttataataaaatgaggcagctctcaaaagagcagactgaaaacggaattgtatgcgcaagtgcgggaaaccatgcgcagggggttgcgttttcatgcaaacacctcggcattcacggcaagatttttatgccgtcaaccacaccgagacagaaagtatcccaagtggaattgttcggaaaagaatttgttgaaatcatattgacgggtgacactttcgatgatgcgtataagagttctgcggaatgctgtgaaaaagaaaaccgtacgtttattcatccgtttgacgatcccgatgtcatggccggacagggaacggctgccatcgaaattttaaatgacattgacgttgaaccgcattttctatttgcaagcgtagggggaggaggactcctgtccgggctcggcacgtacatgaaaaacatatcgccggatacaaaaatcatagcggtagagccgaagggcgcagcctcctattttgaatcgaaaaaagccggacaagtggttgaacttgagaaaattgataaatttgtcgatggggcggccgtaaaaaaaatcggcgccgaaacctttcaaacgctcgaaaccgtcgtcgatgacgttgtgcttgtcccggaaggaaaagtatgcagcacgattctcgaattatataatcaatgcgccatcgtagcggagccggcgggggcattgtccgtgtcagcacttgatctgtacaaggaagagattaaagggaaaaacgtcatctgcatggtcagcggagggaataacgacatcggcagaatgcaggagatgaaggaacgctccatgatttatgaggggctgcagcattattttatcgttaatttcccgcaaagggcgggagcgcttcgcgaatacctagatgaagtgcttgggcctgatgatgacatcacccggtttgaatacacgaaaaaaaataacaaaagcagcggccccgcattggtcggcattgagcttaagcatcgggaagattacggcgcgctcattgcccggatgaatcaaaaaggatttcattacgtagaggtgaataaagatcaggatctgttccacctgttaatctgactttttttagaacggccgcgcaaaatgacagacacgctttctcagattgtatataataaaaagaaaacaatcgaaaaagaaggattgatatcttgttactcaaaagcctagagttcaaacgacaggacgggattcaggtaaaagtgacagaaataccggttgtcacggaaggtgaacattatttttttcaaattcatcagcaccttgagctttatttgagagaggtttttgcttcacaaagtgtgagaacagtgtattcattccgacaatatgtcaagcgccgtatgaagtggaaagattacgaggccgttttcaaccaagagattttaaaacataacgcataacggtgcatattccttagcgccttccttttgataagggagggtgcgggaatttttttatgatgaatgctgtaagcgttttatccatggggggaatggaaatgaaaaaaatgaaaatcttcgctgccgtcttttgtttgctgctcttgtgcgcctgcggggggaaaacgataaaagacccgctgaactatcagattgaaccgttttcatatcaaaaccaagatggaaaaacagtgtcactgaaaagcctgaaggggcatgtctggattgccgactttatgtttacaaattgtaatacggtctgtccgccgatgacggcccacatgaccgaactgcaaaaaaaactgaaggctgagaatctggacgtgcggattgtgtcgttcagtgtagatcctgaaaaggatacgccgaaacagctgaaagcatttgcttccaaatatccgctttcgcttcgcaactgggattttctgaccggttacagccaaaaggacattgaagattttgcgctgaacagctttaaatcaatcgtcaaaaagccggagggagaggatcaggtcatacataaaacctctttttatttagtcggacctgacgggaaggtgcttaaagattatgacggcgtgcagaaagttccgtatgatgacatcctctcagatgtcagagcggctgaggagctcaagtaaactggcagattagacattttcaaatctgaaaaaacatgttacactttccactagtagacggggaaggagcaaccagattgaagctgcgaatgttctcattgatcgccggactggccttgcttttatcagcttgttctgtccagcgcaccggttctgacgctgaagaaccgaaaacgaaagatcatattgtcatagctgcggtcggtgattcattgactgaaggagtaggagatcctgacggttcaggatacgtcggcagggcagcggagtctcttaagaaaaagggacacgtgaaaacggtagatattaaaaattatgcggtgcagggtgacaaaacgtcggacctgctggaaaagcttgataataaaaaagttcagaaatcattaaagagcgccgactatatcttttttaccatcggcggcaatgacttaatgaaggtgctccgccagaatatgatgcagctgacggttcagccgttccaaaaggaagagaaaccttttgaaaaacgattcaaggcgatcgtttcaaaaatccgcaaatataatgaaaacgcagagctggtgtatgtcagcatgtataatccattcacgtttacgctgcctgaattaaaagaaattaatggggttgtaacggattggaacaagattgccgcaaaagagctggaaaaagatccccacgccgctgcggtgaatgttgaagacttgttcagtcaaaaaagcggcagcagacggatttcaaaggatgatgattttcatccgaacgcaaaagggtatgcactcatcgccgatcgattgtacggcatcattgaaaaacaagggttaccagcagaatagggtgaaatgatgaaaaagtggaaatcgctgttttttgttcttctcgcactcaatgtgattgtcgccgcggtaattgtgacattattggttatgccgggagagcaggcgaaaatacaagatcagacaaaaagtgagtacggctttcatatcacgagctcgaaagaatctcttgccaggtttgtgaatgcgtacttaaaagagaaggcatcgaatcagcttgactacaaagtggacatcaataacgatgtgcacgtggcaggtaaaatcaaagcattctcaacctccattaacgcggtcgtcacatttgaaccgtccgtacaggagaacggagatgtgatgttgaaagtgacgaagttttccttaggcgaattaagcctgccgatcagctttgtgctgaattatatggacagcttttatgaactcccgtcatttgtgcacgttcattccggggataaaagcatcgagatccgtctgtcggaaatgcctttagacaacggcatgtatgtaaaagcggataaaatcaatctcgacacggatgaaattgaattttcctattatcatccgaaacaataagttttcataaaaaaaacacagatcctttcagggatttgtgttttttcgtgtcagcgttttttgtccagcttgctgaacagtttgattaacgttgcgagctcttcatcagagtagcagtcaaaccgtttaaaaaagtattctgtttttttctggttgaaatgatcgacaattttctccccggcttccgtaatatggattctgataattcgcctgtcctctttagaacggatgcgggtgatccattccttttctactaaagcgtcggtcactgcggtaatatggcttgcggagacctcaagaatgggggcgaattccgttacttttttaggcccttgttcactgagaatccgcaaaatggtgaattcgttcctggacagctctttatctagaatttcattaacttcatttctgatttgtttaaacacttttcgaagcaaagcttccatatcatacatcatttgtgtccttactttcaaatcatgaacctccaatatgtagtcagcgtggcattcgtttagcttcccctgaaagcagaattatttttattctgtttatacatgctataatataataataccacgtatgaacaaaggagggcacccgtatgtcagaaaaaaaagaaatcgccacatttgcaggcggctgtttttggtgcatggtgaagccgtttgacgaacagccggggattgaaaaggtggtgtccggctatacaggaggtcatactgagaatccgacttacgaagaagtgtgcagtgaaacgaccggacacagagaagccgttcaaatcacatttcaacctgacatttatccgtacgaaaagcttgtcgagctgttttggcagcagatcgacccgactgatgcaggcggccagtttgcagaccgcggaagttcatatcgggcggcgatatattaccataatgatgaacaaaaacaaatcgctgaagcctcaaaaaaacagcttgaagaaagcggcatatttaaaaagccgatcgtgacagacattttgaaggctgagcctttttatgaagcggaaggctatcatcagcacttttataagaaaaatcctgatcactacgggcgctaccgtgtaggttccggacgtcaaggctttctggatgagcattggagggacagataagatggcttttaataaagaagaaaaaatcaaatcattaaaccgcatgcaatatgaagtcacacaaaataacggaacggagccgccgtttcaaaatgaattctgggatcacaaagaagaggggctgtatgttgatatcgtatcgggaaagcccttgtttacttctctggataaattcgattctcattgcggctggcccagttttacaaaaccgattgaggaagaagaggttgacgaaaaactggacacaagccacgggatgatccggacggaagtgagaagcaaaacagctgattcccacttaggccacgtatttaatgacggtccggggccaagcgggctccgttattgcattaactctgcggcactccggtttattccgaaagacaagctgaaggaagagggctatgaagcctgcctgcatttatttgaaaaatagagctcagcaatgaggcctgcctatcagacaggccttttttctatgtttttttttcttcatgtaatcgttcaataatctttacgattgtgtcttttgtgatgagcggcgcctgatcggattgatatctggggagattgaccttccgaaattccggatgtttggcggggtcgggcaatatcgcgtaaaggttgccccattcatataaagattccgtctcatgaggagaggtcagttcttcatgaagcttctcaccagggcgttttcctacttcaacagcggcggggcgaggcagtccgtgccggaacgcatattcttcaaatccgtgaagcagttcttcaagcctcagggactccattttaaaaataaatgtttctccgccctttgtaattgccgcagattgcagggtgagcgttgcggcatcatcaatcgacataaaaaacctcgtcatgtttttatccgtaatggtgagcggaccgcctgccatcaactgctcaaataaaataggaataacggaaccgcgtgaaccgagcacattgccgaagcggaccgaacaaaacaccgtaccgcggttttgaacatgatgattcgcctgatgaaacagcttttcggacaacagcttcgtagctcccattgtgtttaccggggaaacggctttatcggttttttaagatgtttactgtattttgagggactatcagtgacggtgaggtcgataacgaaaaattaaaccttaggataggggtaatttcaaactgagccggaatcggcccttttcttttttgtgtcatcgtaacgataacttctttgaagaccattcttaatagcgcgttctttttctctgtgcttgattcaatgtgatattgatcaattatcctatttatgttgtttctgactgtattactgtctatttctgattgcgcttcttgagttccattgagctcatgcttggcaatctggagttctttaaattcttcatctaaaacagcttttcttttcaaaaaaagttcatcagtgtaaatgccgctctcatatttctcgaagataaaattctctttgttttttaactcttgttctttttgtgaaagatgttcagacatttgcttttttgttttcacattactatttacgtcttcgtatttagaaatcattgaaatgatatgttttgttaaagtcttattatctaagttgcttaaagaagagaggtaatccaaaatggcattttcaacatcgttatatctcacataagtgcatttattctttttgcaagtgagtgatttaacgtgatatacactttccgtgccgtttttgttttctcgcgttcgcctagtttcgtatttagataatggttcaccgcacttagaacaagtgcatacgcctgccaattcacttaattccaatgcgtttttattaggcagcagggggactttgtttgcaattttctcttgtgattgttgaaattgttcttgatctattataggggcatgtgcatccgatactacaatttgttccttttcaggtctaattgttcgtttaccgtcttttgttttttctctaaccttatatttaacagttccgatatacgcttcgttttgcagaattgctttaattgtgtattgattccagcgcttttttcctgatggagtcggtatttgtaattttgttaagtgagaagcaatcgctgtataactataatcttttccattcaacccatttaaaaagaggttaaagatgagttgaacgacttttgctttttcttcgactgggactagtttggatgtttttttgtttaaccggtatccataaggcgctagtccggaaatccatttcccttgtgccgcatatgtgtatttagcgcctgtcatacgctctctggtcatttcaaattcttctctggccataaacaattcaaaacgaatctgacgcatgtctgcagggtttcgagggtcataaactttatatggtgtaatgataatcaatcgcttgctttgaagaaggttaacaatttgtcccgcatcactgtagctccctcggctgagtcttgttatttctttaacagcaattgcctggtacttgccttcctcgaggtctttaagacattctttaaaaacagggcggccctcaatgctttccccagacccgatttccatttttaattcataggggatttcaatcgacttcagtattttattcatgagttctttttgttctgttagcgtatcttcgcctgttcttttttctcgctccatatcctgacgagagcgtctaagataacccaaaatatttgtaatgttgtaagaatgaacgatgttttttaattccaaaaaaacagcacctcctctttattgtatttactgtaaaaacagtagtattcgtacaatattctgtctgacattgaacacgaaaataacctaataaatattgtaggggctgtattctttaagtgttgggctaaagagctcgctcatacgctctatgttttttgttagcctgagaaaatacccaaataaaaaaagaagcctcagaggacttcaaaataattaattcttctcacatgcaaagttgtcattatcccgatccattttagatgtataagcagggtgagtgcttgatacaccatgcggatatttctttctcagctctgtgcagtttgcaaagtgttctgttcctccaacagaaggggaggcttgtgcagagttagaagagctgcttgatgctgaaccgcttgagttcgatttatgtgtctcggattggtgtgttgtaactgacttttgagccggcttagatacacttactgatttcttcggtttcgttacgcagccattaaatcctttatcagtcgcatatccattcttactccaaatcttcaagtctttatctttcgcagcttgctcatctttcttatacgtgtttaaatacttcgtgtttggctcatatacataagctactcgtgctaatccttctttaagcagtgtttcttgtactgatttgccatctgcataaacgtaagccagcattctgccatacttgtctgtacgatctcctttatcaaactccagttgaagttttcccttgttaaccagctgtttgtttcttgctgaagcatcctcaccatatggttgtacgcaagagtttgggttcttagttttaggcgtgtcaacaagtaaataacgaacagttttgacttcgcctttatagttaactttaatcgtatccccatcaactgttctgttaagtgttacatcgaccagctttttctttttgtcagacgcctttttatccgacgaatccttctttgaagcattttcggctttttcatttttgtcattagtacttttgtcatttgattgagtgtctgcctttgtctcttttgcatccttttcttcttgctctgttgttttagcttgatctgaatctgttttatctgtagaagcagaatcagatccacacgcagccaaagaaaagcttagagataatgcgccaatacctaacagccatttcttcaatgtaattcccccaatttgtttgttctgtctctatatcggacaaaccttcctaattataagtataaaaccaaagattgtaaatttcattttggcattttaagacactcaaatacagttgtgtggtaaaatttagtgactcaaacaccttagaggagggaaatttaattggaagaaggaaagttaattcgcatgactcttgatgggataaaggaagctgtttctaaatacggaacttttcctatgctccaacatggagggcatgtcatggaagatgctgcttttcaattcagagacccagccagtcctcaagaaattaatagtttagaaaagatgttaggggtaactttgcctaatgattataaagagttcctattcaatcacaatggaatggaaatgtttaatggtattgagcttcttagtacagaagggataattgaatttaatgaagttcaagacttccctaagggatatgtcctaattgggtatcattatgatggcaggtatgttattgatgtaaacaaatcaaataaagggttggggtatatgttgcatctggattcaattgataatattgaagatgcggtatatttagactctaactttgagatatggtttgacatgttggtgtcatcaaacggaactaagtactgggaagtaaagccaaaaattaaagagtattataaatatgtttcagaatagatagtttagataagatcaagtggaaaggagccgtaaatgaaagtatttgaagtagcctcgttcatttcagccgcagaaaagcgggcaaaacaatacgatcagattagagaacaatttatcaatctcagaaaagcatttcagggaatggctgatttagatgacagtgagttttcaggcaaaggcgccgacaacattaaagcattctttcaagatcacgccggtgtcacagacagctggcttgatctgatcgatatgaagattgcgtttcttaacagtatttctggaaaagtatctgatgccggattggccgattcgtttgtggaagagtcatttttagaacacgagctgattcatgcgaagaataaatcacaagccatcatgcaggagcagcgcaatgaactcaaggacatcataaatgaaatcagcgatatcattcatcttgatgttttctctacagaagatgtcgatcaaaatctggaatcagcagacaaaaaacgggacgataccgtaaataggctcggcaagcttgatcacgatctaacaaaagaatacgccgaaacagaagcgaacgaacagttcatccaggccgactttcagcagctccaaaatgccacgggcaaaggaaaaaacgccactccgcttcactataacgccaaggcgtacagggaaagtgacatacataagaaaaaaggcgagattgcaagacattcagacacatatttaacgtttaagaaggaagaagcaaaagagcggaaaatcaaggatctgaagaaaaagctcgctgacggtgtgaccgatccggatgaatacttggaaattgcgaagaagatcggctatgaaaaccttgaaccttcccagcagcaatatgtcattcagcttgaacaagcaaaacagcttgaagaagccggagaagtgacttgggatattttaaaaggagccggcgttggtttatatgatgtcgggaaagacacggttagcgggttatgggacttcataaccgatccgggagaaaccttgtcagcactggggaatgcagtacttcatccagtaaaaacatatgatgctgtttcagcagcaattgaggaatcatatcaaaaagatatggtgaacggagatgcttactccagatcaagatgggtgacatatgcgataggtacagtagttacctctgtggtaggcacaaagggagccggttctcttacaaaagctgacgtagcaggaaaagtcacctctaaagtcaataaagcaggccaaaaactgaaagatgtctcaattgctgatttattgccttataatccccgttacgatgttgttccggctggaggagttccttataatgtagttaacagtgaaaatttaaaggatcggttacttagattaattgaatcagcaaatcctagaacggtattaccaaggaataaaggtcgatgggaaggcgcacctggtgacggaaaatggtattccgacatacctgaagtaaaagcagcgactaagggagaaccgattacttttaaaaatggacgtcctgattttactccatggactgttgcaaacattaagtttaagtctggtgaattaaatggaacgaaaaaagattttaggcttgtttataaaaaaattaaagagatcaaggttttaaatctcaagcgcaggcgaaaaaatggctgtcacaacagggacttaccccacaccatttggatagtgtcacaatacaactagtgcctagtgtgattaataacaaaatacctcatattggaggagcttctgatttaaggggagggtattagaatgagtttcaataaaattgaacaaaagttaaaagaatttacgatagatactgaaacagaatccaacattaatacaaacgagcagctcaaagaaattgaaagaaatataggtaatcaattgccttccgactataaggattttttgaagggatatggaggctgttatttagaaagtaaaaaaacaacagatgaagttgagtacgacgtttgctataaacctatagagaaagatccttggatgggtaaggaagatgatacacaattactagagagcttctatggtttagctaacgatcataacagtctccaagaagcaatcaatacttattctgatcgctttcctaggaatattattcctatagcaagctcggcaggtggtaatgaaatatgtatggacatcgacaatgaaaaagttttgttttgggatcacgaattaagtcagcctgataaagactttttcctaattgccaattcgtttgaggagtttatcctaagtttagtagacgaaccaattgaaacggatgatagtgacagtgatgtggaaattgagattttagacaatgactttggaaaattgctctttggtaaggacaattagcttttatttttaggaaaagtattgcaaagttaagctctcagaaagagagcttttttattttcgatagaaactaattataaaaagggagagaggttatggattcgtaccaaataaagaaattaaaacccgaagaatacaataagtgtaataatatttgggacatggaaaagaaaatggctaaggtgttttatgacgaattagtaagcggcaacagaattacttttatttactcagtgaatgacgagtttataggagaaggattgttagtttttcaaaacaatgacccggattataccattccggataaacgcatttatctatctcgtatgattgttaaagaaggatatcgaaatcgtgggataggtggcattattgttgattatttgattgattatgctaaacaactaggatatgagtttgacaggtggtcacaaatcataaaataaaaagcccactcatatgagtagggctaaattaattaattttttaacctccgactggcctttcagctatctggatgttagatggtgaatctgtactcaattgcgttaaagctaccccacttaaaattacagttaaaatagatacgcaaagcacaatttttttcataagattccctccacctgattcattttctgttcagcccaaattttttcattgaaaaagcttgttgcttcttcaaaagcacctattgattcaaacctttttgcagctatgtaggacaattcatctacactttcaaggtcattttgttgttttaaaaactcaatataacggatgcaattattgaagttgttttttaattcaccgcaatataggttgaataggatgctaattttggcttcgtatatcttattctccattaatatgagtctttcctgtgctttattgtaaaaattaatggctttcattttttcgtcaattttaaatagttccttaatcatcatgaataaagaatttatataataatttgaattcatccaagattcattttcaatagctttttcgagagatttaatgcacttatcaggtttgtcccaatcagaatacacgatactaagattgtgatataactgagcttccaaatattcatcctgtgtttcttgtgcaatgtctattgcttctaaataatatgtttctgactcttcaaaccgtttcatatcggaatagtttgcagccgcaatcattgttgaagttgccagtttgcatttatagtcagggtgtcgcttatatattgcaattgcattcttgatatagtgttgtgccacaatgctttgtttaacaagagtgtataagtaggagaccttggagtagaattcagctgcttcaatttcatccggaatttctgcaagctttttctccgctaatccatataagttaattgctcgatcataatttttgttgtatgcctcgtacattgcttcgaataaataaaagttatattccaatttatcgttcgttctttttatgaaattttcattctcttcagtgaaataagtgtgcttttgtaaaggctctccgcgtgaagagtgtagcaacattttgtgtctttcttctaataaactgtaatatgcaagaacttcttgatcctcttccatatcatcgaacaggcttttaatctctgagtaatattttattgactcatgtaccttttgtttctttatagcaatgtaccaatcattcagtgtagtagcaacaacttctgaagcgatcttgctcatccaaacccctctttctgaaaatttcaaaaatcctttggggataatcataacatagtcattgaaaaagttgtaaaaggatgtagagattttgggattttctaatttgaaaaaacgaaaaaaataccctcctcgttagagaagggtacgtgatcagtttgctgttgcttttagtgaggcaagccattcacctaatgttcctgagaaaacttgttgaacggctaattcatatgctgattttccatctttaccggcagcgccagtagctccagtactgcctttttcaccttttaatgaagctaaccattcaaaagtgatgaatattcaaggcgggagtaaggaaaattaacaaaaaaatgtgagggaatgtagataaaacgatttatcttggttataccgttattggctgctgttattgcctctccaactcaaatgaaagcaagtccaatgccttgtagtgcagtactcgaaccggtaaatcaaaaactgaaaaatgcgaagggtgcggcactaatctataaagtgcagttatacccgccaagtgctgcaagaacgaatatgagtattcttgctgtccaccttcctcaaccatcttcttatggaagctacgacggttatgaaggatttgcctccaaaacaggagaggtcagttggcgatttaaactatatccgactcccgaggaagagagccctaattgggctggaagggttgattccatatcagctgaaatgacaaatgttaaagtgcaagtgcgcctttcaaattctaagacgcaaaagttggggccaagtgtattaacaaacaatattcaatcttgctattagaaatgtagagttcttatcaaagagagcaatgcgactggatcttttgtaaattgtcaaaaaggtaattgatcgagaaattctggtgaaaaatgaagaagagtccattaagatggaatgtctggagtcaattcatcatttgatagaagagagccggcaaaaatcgatattgcgtttgattttgtacatagaaagacggcataaaaagaaatggttagctaaaaaaaggcaaagagtcaacgctctttaccatcaggtgttttccttaagcggtctgcaatatgcttaattaaattcagcgcagcagtcactaatccaataactaaaacaatttcaagtaagaggataaatccaaaatttaaaccgcgactttcaaagtaatcatcggtaaaaaagagcaattgataaattccaagcattagcacaataaaggaagtgcctataatcgccagagactttttagagaactccttagtatggttgaaattataaaccaataagaacaaaaatagacaagccatggcgatcttatgagtcaatgaatcacttgctgagaacccttgcacaagtaaggagataattaatccggtcattccgattattttgttcaatatatcacctgctttgtataagtatgaccttagatgtcagcttaccaattaaaggtgatattctcaacataatgcagtttaaacttaacttaaaatcgtaattttaagaacaaatttagagtggatcatgacatgctgtttattatgctgtaaacaaacgcaacaataaataatggataagagataatagcaattagttttgaagatttgttctttttttcaaatgtgtatattagtgcaaatcctaaaaagaatattgtgacaaaccaagaagaataggacgggtacaatgcaataagtaagacaataagagtggataacgcaaaagaagagtttagcgttattttctgatcgtttttcaaataaaccgcctccttacacatattccccccatataaaaacacttaaacattatattaagtcagcatgattaaatgataaacattttaagtaaagaacaagataaagcaatccggcatttcaagacaagctgaacatgtctgaaaaactgtacatatccttagttaatgtaaactgcttatagataagcaaaatgattaagcggaaaggctgtatagacttataggaccttatataaacattagatcgcttaaagaaggtgatgtggttgatcagccaattgaatatttcatgatgcaattgtgcggttctataatggtgaagacctcgccgtgttccatttgtctagggggggaatttgtttaaattcataaacatgaggcgttttagtctgtcatttcctaaaacagtgttttattcttgttacaaatatgcaagaagggcggtttgaacttgtatagagtgtttataatgctgttaattttgttatgtataacattagggtgtcaaaaccaacataacaaacattttatggaagctgagcaaaccatggtcggctatgtcatttttaaaggagagaatcaagcaattctcacacctaatgaaaaagctgatgttaaagactatgaaaatcttagtgaaaaagagattattgaaaagtatagatcggatatagttttactgggacttagtcaacttaacaataaagatgacttgagcaaagggcaaaaaattcgtatttggtataaaaaattaaatgaatcttcaccgccaaaaacaaacatctcaaagtttgaaaggatttagtacatattctgtaattcctaggaataccgctgaaaaaactgaagcggcatattgaacagaaataatgtcttcaaaccttacctcattcgcggtggcttaatcctgccccaagatttatttgacgattgttgactcaggtgcagagaaggcacatgccaagaacacatttttgaattactgggcaccttgaataaaaccagcattcccgtattcatatgcgaagagatctgtctgaacgctggataagttaaccatacatttgaacaagcttgcgaggctttgataaagaaagaacagtcaagagacgaaccattacatacatataatactcctgtgaaagcgggggtgtagttttggaaccttaccaacgttatgaggaattaaagaagaaaacaataaaggttgtccataaagataattacagtatccgctatatagatcaggatgaagcgagtaatgacttagatgaattttataaacaatttgctcagcatttattggaggctgctttggaaaggagtgcagagtaagcttctttttttgatttgtttgtagtaagtatcttaataaacggctttatcggtactgatattaatcacatgcgtcacctcttgcagcaaagcggcttctgcgacattttgtccgccgataaggttggtttgaatggcttcaaagggattatcctcacatgtcggaacctgcttcagcgcagctgtgtgaaagacaatatcaacacctttcatcacttggttgactcttctgtagtcacgaacatcgccgagcacaaatgacagtctttgttcatccgcgtatttttgtttcatcacatattgtttgctgtcatctttgctgaacacaatgacttctttaggggttaagagcaaaaggcgttttactatttggcttccgattgatcctgtcccgcctgtgacgagaacagttttatcgtgaaaaaacggttgtagctctactgcttgctgtttaggcatggcttatcctccaactctcgtttctctaccatgcatcatatgttgaacaatttcagcgagttaatgaaagaaaccaataaatcaaaaattagagaaaaacattaatctgatgcgctttcatatcgctttacccgattaatagaatagaaatcacaaataaaacattgtactaaatgttcattctaaatatttgctcatgtcaattctttctcttcataaattctcacatgcggacaatcttcacaaaaacttaacactgaacttcctgtatgtattttacaattaaagtacactttcataaaaggaggaaggaaaatgaatcattcaaaaacacttttgttaaccgcggcagccggattgatgctcacatgcggtgcggtttcttcccaggccaagcataagctgtctgatccttatcattttaccgtgaatgcggcggcggaaacggagccggttgatacagcaggtgatgcagctgatgatcctgcgatttggctggatcccaagaatcctcagaacagcaaattgatcacaaccaataaaaaatcaggcttagtcgtgtacagcctagagggaaagatgcttcattcctatcctaccgggaagctgaacaatgttgatatccgctatgattttccgttgaacggaaaaaaagttgatattgcggcggcatccaatcggtctgaaggaaagaataccattgagatttacgccatcgacggaaaaaacggcacattacaaagcattacggatccagaccgcccgattgcatcagcaattgatgaagtatacggtttcagcttgtaccacagtcaaaaaacaggaaaatattacgcgatggtgacagggaaagaaggcgaatttgaacaatacgaattaaatgctgataaaaatggatacatatccggcaaaaaggtaagggcgtttaaaatgaattctcagacagaagggatggcagcagacgacgaatacggcagtctttatatcgcagaagaagatgaggccatctggaagttcagcgctgagccggacggcggcagtaacggaacggttatcgatcgtgccgacggcaggcatttaacccctgatattgaaggactgacgatttactacgctgctgacgggaaaggttatttgcttgcatcaagccagggtaacagcagctacgcgatttatgaaagacagggacagaacaaatatgttgcggactttcagataacagacgggcctgagacagacggcacaagcgatacagacggaattgacgttctgggtttcgggctgggacctgaatatccgttcggcctttttgtcgcacaggacggagaaaatatagatcacggccaaaaggccaatcaaaattttaaaatggtgccatgggaaagaatcgctgataaaatcggctttcacccgcaggtcaataaacaggttgacccgagaaaactgactgacagaagcggaaaataaacatgaaaaaagcagcttatccaagctgctttttgatgtgaagagcgtttcatgagaaagtcttggaacggatagccgcaagcacagccggaatctggtcatacgtgtacgccgggactgtctcttgataattaagcgccgcggtttgtttacgttcacccgggtttgtcatataaaaatggatcttatccgcaaaatccgcaagcccgctgtaagaaacaaaggatgaaaacgggggcgcgggagaaaggtctgtcagctgaaaggcctgacaagccgcaatgtctaagcttctcgtatttaaactgatattttcgatgccgcgtccgttctgattgagcgcaaaccgataagaacggtgagggtttaagaccacgtctgcgctgttgtaatataatgcggcacgttcgggtgcaatccattcatccattacgagcacattttgctgcctggcgatttttttaggcagatgtctgcgccatcccttcccgatgatacgaagcgtatacggaagcttcgccgctgctttcaccagttcaacgcggttcgggtacgggtatccgatcagaagcagatttgtgtgaagagaagcttcagcaggttgtttcttaaaaagccgctgattaacggggatcgggacataatatacgtgctgtaagcccatttgccggtaagcatcaagcgcgttttgttctatcgttaaaacggcatcggcgaaaggggcgattgtcatgctcacatcgaaataaaaaggatcctccgtcatccatagataaacgggaatctgttctgtcttcagccattgaagccattcagacggaatacggtctcccgtcatcatcagactgatgtctggtttgaatgcccgtatactgcggatggtatcttcctcaaactcagaaacagaaaaaaagcggacggaagactgtaaaaagccttcctcaatccagcggtcaaaatacgtgtatatgcctttatatcctgaacggatatataaaacgttcatatgctgttacgaagtgaacgtgacactttcaactttgtcgacgtcaagcaatgttgtagcagagcctgccggtgtaacggaattttcctgcgtaacaaaaacgattccgtgaatttcgtcaaaggcaacaaattgaaccgggccgatcatgtctcctgaatccatcacaatgctgatgacagtgccgggctgaattcttgcaaaaatccatctcgcagctaatgaaataccgcttcccaatacagattgtgcgctgagactgtctttcgccgctgcttcatctacttttgcatcaattgccgattccaataattcttttactttgttttccacattatctcctccatctgtaccgccagataaagcgctgttgtcaaatacaggggctaaaagagttttcaataactcctttttaagctccaaacgatcctcgctcatgcggacatacacctcctttaacaatttcaacctcacgtttattcatattcctgattgaagagattggtataagtcgaatgccgttttgcttgtgtttttttcaatatttaatcaaacagctgaattttcgaatcaggctttgtttgcctatgcggtttgtaagagtatgacatacgttgtatagattaaaaaatgaaggagaggaatattttggattcggaagaaactgtaaaacacgggggttttgaggaggaatttcagctcgtactgcttcttcttcttttgttatcccgtcagccgtccggagatcattcagatttgcggcgtcagcttgtaatggcaaaagagcttggggttcctgtatcacgcgtcaatctgattaacggcagcacactgcaaaacgtaattgtcaaagaagtgctgtcagatttggccgtttttcaaaatccgctcaatcatacgagatcaaacgtcgcgatttcaagcatcgtcagctggggtgctttttaataacggatatcaggctctgtctctttcggagccgttttttatgtttttacagaaggggtgatgggatggaaaagaagatctcaattatcttaacgagttacaacaaaccggatcttgtgaaacaggcgattgaaagtgttttgcatcagacctacagcaattgggagctgtttgtaatggatgatcattcaaatgaagaaacctcggctgccatcagtacgtatataaaagatcctcgcatatattatgacaacagttttatcaatcctgccgaacggctgaagtccacccggtatgccgttttgattaatgatgcgctttcacgggctaaaggtgaatacatcacttatttgacagacgacaccgtatttcatccggataggctcagccgcatggcggaagcgcttaatcaatacagcgagtttgatgccgtctattccagccagaaggtgatacatgtaaacgggcgcggaacagaacaattccacttctatcgttatgctgaagaggtgctagatcaggccgcttttctcgttgatcactgttcagtgatgcaccggagatcattgcttgagcgtgtgaaagagaagttcggcagcttttgggacgaagatgttatgcattggaatcacggagactctgttttttggagcaggctcaacacatttacatcatttctgccgataaaagaagtgttggatacgacctataaaacaccccactcatttcagaacacgtatcaatcgcttccgtctgtcctgatcgacggatcctttgtaaaggggacggatcagaaagtatatcagcttgaccgaaataaaaggaagcctgtaaacgagcgctggcatacgttatatgaaggccgaaccgtcgtcattccggatccgtttttatttcaatatgaggaagagaactccgtcagtattccgaattttcagctcgtcagggatcagtttcatgtttattttatagaagacggggagaaaagaatggttgatcatagcgcatttcgcttttaccgatttaaacggcatgacatcccggctttagagcggggcgaaatacaatcgcttccggacggtccgccgatcagccgggggacatcgggctgtattcaacatctgcccgggagaatgctgtttcgcattgaacgggaattttatgtttatttgagaggggttctccatccgatcagtcatgacgtagcgaaacgcttttttgcgaatcagaaggcgatacccatttcctttcagcaaattaaacaattaccaattggaatgccgttctatccggtgtacgatgaaattatgagaaatctcaatataacaaaaggttgagagatgcagttggatgtgtaaggaaaaggagagcttttatgaccgatcaatttgataaaaccgagaagcagtatatagagcttacttccggcattcagaggttcgagcatttcagtgtatatacggacccttttttgccgcagattttttcgcataactttgttcagctgcaccgtacatttccgttagacaaactgctgccgtttttttcgtccgttccgggcttgcttcaagccaattatattcatgtgaaagcggctccggagcacgcgtttccgcttcttctgaaacaaaatctcgtaaagcagggctgcgtagtggaagatgagctgttttttgcaaggaaactggaaaatagggacctgcaggccggacacccgctcactgcttgggggacggaaaaaagcctcgccgacgggtcgtctattatgaacatctatgatgccctttacattggcgaggcggcggccgaacaaaagcttgagcggaaatatcctttgtataaggacggaacggttatgcttgtcgtgtgctacagcgacgcctcgcaaacgattccgatcggctgcggagagcttttcatcaacaaagcagataaaaccgcaaaaatagaagaagtcgcaattctggatcaattccaacgaaaaggctacggatcgatattgatgaatgagctgatggcggcggcaaagctgaacggcatggaaaccgtataccttgtgacgtccgggatggacggtgtaaaccgcttttatgaaaaactcggcttcaaaagatttcggcgcgtgcatacaatttttcattattttcttacatagttgggcattcgcataaaccaattgggagttggcccgcatacaatgccgtatatcgtaagaagaaaggatgatttgcgtatgtacggatacggatatggctacggttgcggcagttttggctatggttacgggcacggcggctgcggaggcggaaccagcacttttgtgctgatcgtggtattgtttattttattaatcatcgtcggtgcggcttttatttgttagactgaaaaaaatcctataatgaaaatcagcctgcagagaacatcactttctgcaggctttttgttatttccatgctgaaaaatcagcttgaaaaacattttaatacatactacctttctggagaagggggcgaaaatgtgaacataacgattgaagaattacctgaatccagaattgcttatttccgaaacatcggagagtatggcggaaagcaaaacaatgaactgatggagtcatttaaaaactgggcgcaattgaatggtctgcttgatcattctgtcattttaggaattccgcaagatcatccgaatcgtactcctaaagagaaatgccgctatgatgtttgtcttgttatcaatcaagaccatgtgcctgaaccagcccggatcggtacattttccggagggaagtacgctgttttcttgcttgatcatacaaaagaggcagtcagtggattttggaacactattttttctgagatcgaaaaaaataatttatcaatcagagagcagcccattatcgaaaggtatactttccaaaaggtgaatcatcatttgtgtgaaatattgattcccatacagtaaagaagacgggaattttccgccatctgcttatactgattcagatcaaaaatgatgtgataatgagctgagcaaagaataaaatcaacaataggaatagaatttccagaacgcttttcaggctgtcgggacatctccggcagcctgttttacagaaaggtattttctgcaaaaaactttctgaaggataagaatgcggttattcatctgttcatacaatgaagcaaatgggttttcgaggtggaaagatatggggagctatttaatcaaaccggagcttgacgggaattatccgtcagtcagtcatggaaagggatcatatgtgtatgatcaggaggggaacaagtatcttgacggagcatcgggggcggtcacttgcaatatcggccacggcacggaggatattatacaagctttaaaagagcagcttgactctgtttcgtttgtgtatcgctcgcaattcaccagtactccggcagaagaactggctttatttctggcggatcatctgccgggcgggctgaattggtcattttttgtaaacagcggctcagaggcagtcgaaacagcgatgaaaatggccgttcaatattggcaggaaaaagggcaataccaaaaatccgtctttctatcaagatggggcagttaccacggcattactttgggagcgctttcattatcggggttctacgaacggagataccgcttcacccagttgctcgaacggtttcctgccgtttcagcgcctaatatgtatcgttcagagctgcagggagaggaatttgtgaaagctgcggcggctgaactggaaacggctgttcagcggatcggttcctcatttatcgcgggatttgtcgcagaaccgattgtcggagcagccggggcggccatcactccgccggcaggttattatgaagcgcttgaggatgtctgccgccggcacggtattttgtttatcgcggatgaagtcatgacggggctcgggagaacaggacggatgcttgcttctgagcattgggggatcgcacctgatatcgcggtgctcggaaaagggttaggcgccggttacgctccgatagcggcagccgttgcgtctgatgacatcattgaaacgatcaagcggggctccggggtcattatgagcggacatacgtacagtgccaacccatactgtgctagagcggcgcttgaagtgcttcgctatgttaagaaacacgatctgcttcggcagtcagaggagaaaggcgtaatgctgaagcggaaattagaagaaatcaaagagcgcagcggggtgattggggatgtccgcggtaaaggcctcctgatcggggttgaattcgttaaggataaaacgacgaaggacgttttttcgaaaaaacaggccttcaccgaaaaaatcattaaagcggcaaaaaaacggggcctgcttatttaccctgcaaagcccggtattgacagcggagaaggagacgccgtcatcatcgccccgccgttcacgatttcatatgccgagctggatgagctgtcagatctattttcacaggccgcagaagaagttgaaaaaatgatgaagaaggattgagctgatatgtctatttttcataaaaaaatcgatattcatgaagcaattgccgatgtcaaggacgaatctgtcatcatgttcggcggttttgggggagtgggttcacctccgtcattaatcgaagcgattttggaaagcggcgttaaagagctgaccgtcatctgcaatgatgccggatttccggaaattggcatcggcccgcttatcgttcataagcgggtaaaaaggctgatcgcttcccatatcggctcaaatcctgtcgcgggcagacaaatgactgacggagcgcttgaggtggaattttcgccgcaagggacgcttgctgaacggattcgtgcaggcggagcggggctaggcggtattttaactgatatcggcattaataacgcaaccgtttgtgaaaacaaagaaaccgtaacgattgacggaaagtcctatttagttgaaaaagcgctgacggctgatttcgcttttgtgtccgcacatactgctgatgaattcgggaatctgacgtttgacaaaacggcgcgcaacatgaaccctctgatggctgcggcggccgaaagaacatttgctgaggcggcagagattgtgcctgccggcgaacttgacagcgagcatattgtaacgccgggcgttttcgtggagggtgtcgtgcaaagtgaaggagtgaagtggaaatgggcttgggaatagcggaaagagagagtatcgcgaggcgggccgccagtgaagttacctcaggtatgattgtcaacctggggatcggcattccttctttagtgccgaactttctgcccgccggcatggaggtaatgctgcaggcggaaaacggcgtcctcgggatcggcggcagtccggagcgcggagaggaggatgagcttttatgcaatgcggccgggtttcctgtcagtacagttaagggtgcttcctattttgattcagctctgtcttttgccatgatcagaaaagggctgatagatattaccattttaggcgcgctccaagtcagcaggacaggtgatctcgccaattggctcgtgccgggaaaaaaagtgcccggaatgggcggggcgatggagcttgcccaaggcgcgaaaaaagtagttgtcgtcatgagccacaccgatcagaaaggacggccgaagctggtcgaaagctgttcattgccgcttacagcagcgggctgtgcagatctcatcattacagagaaagccgtcatcagcatagatgatggggcttttgttcttgaggaactgctgaatggcacgaccatagacgatgtcattcaaacaacggatgccgagatcagattgggagaatgttttcttaaaagggggcctgtccatggatcaattagaaaagaaagtcactgagtgggcggaagaaaacacagcaaaagcggtaagcttgctgaaacggctgatcggggaaaaaagcacgttcggccatgaatttaacgcgcaggcagtcgttttagaaaaactgagacagtttgacatggatattgatgtatgggagccgagtgtcaaacatttgaaagagcatccttatttcgtatcggaacgcgaagacttccatgaaagcccgaatatcacagctgtaaagaaaggggccgggggcggaagatcactgatactgaacggacatattgatgttgtcccggaaggaaatcccgccgcatggacgtatgaaccgtttaccgctgttgaaaaggacggcaaagtttacggccgcgggtcaacggatatgaaaggcggcaatacagctctcttgtttgcgttagaagcgcttgaagcctgcgggattacattaaaaggagatgttctgtttcaaagtgtcatagatgaagagtgcggcggcgcgggaacactggcggctgttatgaggggctacaaggctgacggggcgcttattcccgaaccgactaatttaaagctgtttgttaagcagcaagggtctatgtggttccgcattacggtaaggggattgtccgcacacggcggcacccgctatgaaggggtgagcgccattgaaaaaagcctgcatgtcatcacagcccttaaagagcttgaacacgtccgcaacgcccgtatcacagacccgctttatcgggacgttccgatcccggttcccattaatatcggcaccgtccaagggggaacgtggccatcatcggtagctgaccgtgtggtgatagaaggcaggtgcggaatagctccggatgaaacgcccgaagcagtaaaagaagagctcgcaagctggctgaaagatttggagtaccgggatgagtggtttaaacaccacccggcggaaatagaatggtttggggctcagtggcttccgaatgatctcccggatgagcatccgctgatttccgctctggaatcttcttttgagaaaatgaaaggggcaaaaccggttcgtgaagcgtccccgtggggaacggacggagggcttttgcagcacgcgggacagacgccggtcatcgtcttcgggccgggagaagtcaaagcggcgcatcaggcgaatgaatacattgaaatccgggcgttaatcgatgccgtcaaaatcatttctctttttatcatggaatggtgcggggtggcagatgggggtgacggagctgataaaggaactgagggctgaaaagggagcggccgagattgatgcagaccgtttcaatgagcggctcagagtcattcgttatgacggacagatcacggcgcttattccggccgttttggcagaagcaaagcaagaaggagcccaaaaggtaattttctttgccaagcgcggcgatgagccggaatttgtcaagcatctttttattgttgagggtgtcatagacgggtattacaacgggcatgaggctgttgtgatggtgcgctatttagcagaggaacggagacggtcagattcatatgtatcagaagattcgactgttgaccgtttatatgagacaccgcggcggggactgactcaggcagaaagcgcgctgatgttcagaaaagcggatgaagatgatgcagaccgcttatcgcacttatataaacatgtttttcttacctatccgactcctgtctttaatcccctttatattaaaaaaacaatgagagaaaacaccatctattatgccgcattcgatcaggatcgtctcattggggcggcaagcgcagatatcaatccggtattggggcacgctgaaatgaccgattgcgcggttctgtcagattacagggggaactccgtaacggcacacttgtttaaagcgttggagcaggaactcgcgggccggggaatcatccatcttttttccttggcccgtgcagcgtcttacgggatgaatgccgttttgtaccatgcgggatacggctacagaggcaggcttgtgaacaactgccgcatttcagaagggctcgaaaatatgaatatatggtgcaagactttacgtttggccattcataaggaggaattcgtttgacaaacaaatggtttcagccgaagcgtcattggaaggagattgaattgtggaaagatgtgccggaagacaagtggaatgattggctgtggcagctcacccatactgtaagaaccgtcgatgacctgaaaaaagtcattcatttgaccgaagaggaagaagaaggcgtcaggatgtctgtaaaaaccattcccctgaacattacgccttattatgcttctttaatggatcccgataacccgagatgtccgatccgcatgcagtccgtgccgctgtcagaagaaatgcacaaaacgaaatatgaccttgaagatccgctgtttgaagatgaagattcaccggttcccggtcttacgcaccgctatcccgaccgcgttctttttctggtgacaaatcaatgctcgatgtattgccgatattgcaccagaaggcgtttttccggacagatcggaatgggggtgccgaaaaaacagctcgatgcggcaatcgcttacatccgggaaacgccggaaatccgtgactgcctgatttccggcggagacgggcttttaatcaacgatcagattctggaatatattttgaaaaacctgcgtgacattccccatcttgaaattatccggatcggaacgagagcgcccgttgtatttccgcagcggataacggataacctttgtgagattttgaaaaaatatcatccggtctggctgaacactcattttaatacgagcatcgaactgacggaagaatcggttgcggcgtgtgaaaagctcgttaacgcaggtgttccggtcggtaaccaggccgttattttagcaggcattaacgattcggtgccgattatgaaaaaactcatgcatgatttagtgaaaatccgcgtgcgtccgtattatatttatcaatgtgatttgtcagagggaatcggccatttcagagcgcctgtgtcaaaagggctggaaatcattgaaggactgaggggccacacaacgggctttgccgtgccgacctttgtcgtcgacgccccgggcggaggcggtaaaatcgccctgcagccgaactacttgctctcccaaagtccggagaaagttgtgatcagaaacttcgaaggggtgattacatcttatcccgagccggaaaactatatcccgaatcaagccgacgactattttgaatctgtttttcctggaacgatggccaaacgcgagccggtcggactgagcgccattttcgcggacaaagaggtttcgttcacaccggaaaatgtatcgaggatcgacaggaggaaaacgttcacatcaaaccctgatcatgaaacgctgaaagaccgcagggaaaagagagatgaattgaaagaaaagaaatttattgcacagcaaaagaaagagcaaaaagcaggatcggaagtcggaggtgaatcgccgtgaagccatgcgagtggtgcggcaatcagaaggcgtcagcttgtcaggcggctgtgtactgggagcttcctgacggtacgagggccatagaaattacagaaacacccgcattcgcctgttcctcctgcagcatgacttatcaggaggaagcggtcatagcggaaatcgaaaatcagctttttttagtcaatgcaaaaaaattaccggaaacactcacatatcaagagctgatggagacagaacggatcttgaaacggaattattttgacttctcctagtcttcttttgttgtaatttcacacttgaattgtataatagtacaacaaaagacagtcatcaggaggggaaacccatgaaatccttttatcactatttgatgaaatacaggcatcccaagccgcaggacgcaatcagccagtttgcgaatcaggcatacgaagatcacggctttccgaaaacgtcaagcgattatcacgagctcagttcttatttagaactgagcgccgactatttagaaacgatggcgacatttgatgaagcttgggaaaaatatgagaccgaggtgcatcacgcctgacgaaaaaccgcacattgtgcggtttttttctgttgaaatcactcgcttatgaggtgccgtatgatcaaatcccgcaacgccgtccgtttgatcagctcgtaaacacatcttcctgaaggcacgtatcataaggcagtagaatgtatagctgcagagttcaccggatcaggcctgctgacggcggggtcccgggtaaggagcctcttttcacggagaaataatcaaacatttaaatgaagtgaggggaatcaaatgatccattaggtaagactgatgaggcactgacgtttggacggaataggggattttatgtgacaaggttgaagcggattgaagttgtgccttgcaaatatgcagccggaattggatctccctacaccttcgatgatgtgtttcacggcaaatcttgaacatcacggcggtgatattgtcaatatgccttcgggccgggtgtttacctttgcgtcatagagaaaaaacaaaaactcattcaaaataggcgcgttttgtctcagcactgttactgcagtcgatcgagagcgaaatgtcatcggacgcttctgttacggtaagtgaaaaaacgcacaagcatgttgcggtttttgccattttgaacaggtgcagaaatagatatttcctgtggttttcatgcccatgcgaaatgatggcggccggcatacgatagcgtatgacagtccgcggcaagggggagacagcatgaagccagataaaccgaaatttcaagtgggagacatcgtggtcgtcgtgatgtacggaaccgtcggcaccattacgaaggttcatcaaattgataaacattatctttacgaagtcaatcataatgaagtgctttattttgaatcgtccatccagctttataaagattatgagggcgtgatcgtcgatatggaaaaattggatattgaatatgaatttctgatcggcgacgtagtatatgtaaaggactacggaaaggaattattccgtgtcatcggccacagaactgaaatatggagatatttagaggatggctgggaggatattatttatgagctgactcggctgaaagacggagagtggcttgaaacggaggaagaggatctcacgctggttctgagaaaatatgaaatggatcagtttgtgcatcagctgctgtttgtccactatgttggggaagcatctcatgagatcggcgaggataccgtcgcgtctgctcttcttcagtttgaaggcgatgctgatgatcccgataccctgcatgtgctggcggtatcgattgtagatgagctgcttgatatttataacgattataagattctttatcatttgttcggtgacgaagaatataaagatatgatgaattttgtgctggaaagcctgcgggagcatttcagctagccggcaaaaaaacggacggtgacatataaaaaccagggcagacagccggcaaagattacaaacgacattcctttcagcactttttccaatacgacatcaaatccatctccgtccaataaagccatcattttcgtcatcatcttttctccctccggggcttgttttttaaaagtatatgagcggacaaaacgtttagaactttcgggtataatttgaacggttttttcataaaacataaaaaaggaggcggtgtttgcatgaaagaaatagatcttgtgattgacacagaagaaatagctgattatttttacagtcagcttgctatgcgcgggtacataccgagtgaagaggaaatcttcgaaatagccgacatcacctttgattatttattagaaaaatgtatgatagacgaagagcttgatgaagactgaaactgcggaaccgaagtgaaaaagcttcggttttttcaatcagctcgggagaatgaaacatggggggaaaacgttgtacaagccagcaagtcttttcgcattgtttattctgctcgcagcagcgatccggatagaagccgtccgggtttttgatgagcgtgtcatagaagcggctgtcaggatcagggctgcctggctgaatgaattgatgttatggataacggagctcggcacgaccgcggtgcttttgccgcttcttcttttgacaggcgcggctctgtatatgtacaaaaaaacgccggatgttgtttttttgccgcttctctttctcattgaacggattgtaaacataaaaataaaagaattgattgaaagagccagacccgcttttgaaccgctcgtccatgaaacctcatacagttttccgagcggccactccatgaattcggcagtgatgtaccccgtcatcgcttactttttgatcaagcatgttccgtttttcacgaaaagaaaacgggccgtcaccgtctttaccggggttctcgtcattctgatcggattcagcagaatttatttgggcgcgcattttccgacggatgtgcttgccggattcagtctcggactttgcctcgtttcgctttttgcgcttcttgacgaaaagtatcacccgtttcgacaaaaatagagacaggaaaaatgagaaaaaacgctaatactattaagaaataagagggagggatcttgatgctgttatcgctgcccgtgtttaaaaaaaagacttgcgcctatgatgtgacgatttttcaaacaccccgctacggcgagaaaaagggatacagggtcgtctatcggacagagctggccgctgacaatcatcaagacgcactggaaagggcattttctgtttttaatgtgcctgatacggtcccaaacgactatcaagccagattcatagcgaccggagatgtcatactcatagacgaaggaagaaaaggaaagacgtattacaggcttaaccctgcgggatggagcaaaattaaccggctgctcgtccagccgaggtaagacggggccggctgaatcttcagccggcttccgtattgtctgggaaagactgtgttaaggcttccgtttagcggcggaatgctcttttccatgcgcttcatcagctgcaatgacgtctgaaacgggcacgtgattgttctttttctggccggtcacccggttgcgctgttttttgcccattatgttcactcctttttctttaggcttgtcatcccgcatattctgcccaagatcgccctgatcatgctgatgattgtctcttaccgttattcagtgtacaatgggtgggagtttgaataggcaggaggaaaaggaaatgagtgtacatataaacgcagaaaaaggtcaaattgcggatacagtgcttttgccgggagatccgctccgagcgaaatttattgcggaaacttatcttgaaaatgtggaatgctataatgaagtcagaggaatgtacggatttacgggtacatataacggcaaaaaagtatcagtccaaggcaccggcatgggtgttccgtctatctctatttatgtgaatgaactgattcaaagctatgatgttcaaaacttaatcagagtcggctcatgcggagccatccgtaatgacgtgaaggtgcgtgacgtgattttggctatgacgtcttcaactgattcacagatgaaccgtgtcgccttcggcagtgtagattatgctccttgcgcagacttcgaactgcttcataaagcgtaccaggaagcgcaaaaaaacaatcttcccgtagcggtcggaagcgtattcaccgccgatcagttttacaatgaagactcccaaatcgaaaagcttgccagatacggcgttctcggcgtagagatggaaacgactgctttatatacgcttgccgctaaatacggcaaaaaagcgctgtctatcctgactgtaagcgatcacgtattaacgggagaagaaacaacggcagaagagcgtcaaacgacttttcatgatatgattaaactggcgttgcatactgtatcgtaaacttgagatgagggttatgctgattaaagcagccctcttctttatgcatcgccctgattcaaaaaaagaaaggtaagtgtaaaatgaagaaatccactaaatggttctcgctcgctgccgctctcagcgtaaccgcaatcgtgggaaccggctgcagcatttcaggcggcgacagccacaaggacacaaaaacagcagctgaaacaaaacaatcagatgacacatcaagcaaaaaaacaacgaaggcagaaaacagcgattttgtattggagagcaaatattttaatgatattaaagaagtgaacgggcttgagaccattcaaaacccgacaaatacacttgcgctcgtgaataagacatacacgctgccgggagattataaaccgaatgatctcgtgatcccgaaagtcgaattttcttttactgagaaaatcgagaaacgatatatccgcaaacctgccgccgatgctttggcgaaactattcagcgccgggaaaaaagaaggttatgacctggttgccgtttcaggataccgctcttatgacagacagaaagttattttcgataatgaagtcagtctgaaaggtgaaaaaaaggcgaaagaagccgtcgcatatccagggcaaagcgaacaccagacggggcttgccatggacatttccagcaaaagcaacggatatgagctgaatgaagcgttcggaaacacggcggacggcaaatgggtgaaagaccatgcgtatgaatacggctttatcatccgctatcctaaaggcaaagaaaatgtcacaaagtatgagtatgaaccatggcatttacgctatgtaggcaaaaaagcggcaaaagccatccatgaccatcaattaacgcttgaagaatattttaatgaagtaaagaaagtgtaataagaagaagcccgcttgaaaaatagaaagcgggctttctttattaccagaagagtaaacctccaagcgcaaatccggtaatgaaaccaaggccgataccgtaggctgctccccagcctccccagcctccccaatagccgaacccgtatcctctgtgacggccgccgacaggggcgatatacactttgctgttagtcacccgtacgattcttccgacgtggactctgccgtttcgttctgtaattcttgctacttttccctggtgctgccggcaaagatgataatagttttgcatcttttctcctcctatccaacctatctttctatgtcagcttatgatagagtgcggtaaaaaggttggacgaaaacaggaggacaatcgccgttttacttgtaagcgacaaaagcgcagtgtcccatatattcacggtacgtttgcataagctcgtaatgagccgtcagcgtatcgtagtgaaccggctgaataacgggcgataaatccatttctgtagtcggctcccgcgcattgttttcatagacagcgggaatgaaatccgcgttctgaaagccttgctgaaacaatctctgtttccatgccgtttcatcctgcaatacggtaaaaccgtagaagtcttttatctgcgtgatggcgttttccggcatgggcttttgtaaagcagcttcaatgccgatcagcatacccccgggtttaaggacccgcaggatttcagacagcgatgaatcaagatttgaaaaggtgagaactgattcggaaagaacggcggaaaattgattttcagcaaacggaagccgctcaagctccgccaaatagcccggaatggttaagccttcagcggcaaatcgttttgctgctttttcaagcataaggggatccttatcaacacaggtgacggggtacagcaggtggccgagataagcggccgtctgtcccgttccgcagccggcgtcaagaatcggttcgccaggaggaggagccgcttttgtgagaacggctttggaaaaagcgagcccgccggggtgagcccctccgactccgaataaggacagcatttctaaatatttgctcaaaggccgaatcctccttttttcctcagcatatgttgagagaaaagcataggtttgggtaaacgggaaagaagggcgcctcacgtttgaagttgacgaatgagcgttcgtctatgataataatgtaagaataaaaaggtggtgttttcttgaagcggcaatttaaactgttttttattatattgatcactgcggtcgcagcctcggcgcttacgctgtttatcacgggcaatacgaccattttcggacaaggctcggctgctttgacgaacagcaaatttgagaaattcaataaagcctacgagcagattaaaagtgattactatcaaaaaacagatgacagcaaattagtagacggagcgataaaaggcatgatcagttccctggatgatccatattcttcttatatggacccgcaggaaggaaagtcttttgaagaaacaatttccgcttcgtttgaaggcatcggcgcacaagtggaagaaaaggacggcagcatcctgatcgtatcgccgattaaagggtcacccgcggaaaaagcgggggttaaaccgaatgaccagatcttgaaggtcaacggcaaaagcgttaaaggccttaatgtaaacgaagccgtcgcattaatccgcggcaaaaagggaacaaacgtcaagcttgtgctgcacagagcgggtgtcggcgatctgaacctgtcgatcaaacgtgacaccattccggttgaaacggtgtactctgaaatgaaaaaaggagacatcggcgaaatccaaatcacatccttctccgaatcgacggcaaaagagctgaattcagccattgacagcctcgaaaaacaaggagcgaaaggatacattctcgatttaaggggcaacccgggcggactgatggatgaagccatcaaaatgagcaacatgtttatcgataaagggaaaaatatcatgcaggtcgaatacaaagacggcacgaaagaggtcatgaaagcgacgaaagagcgcaaagtgacaaaaccgacagtcgtcctcgtcaatgacggcaccgcgagcgccgcggaaatcatgtcggctgcgctgcatgaatcatcgggcattccgctgatcggcgagaaaacgttcggaaaaggaaccgtgcagacggcaaaagattacagcgacggttctaccgttaaactgacaatcgctaaatggctgacagcggacggagagtggattcataaaaaaggcatcaaaccgcaatatcaggttaagcttcctgaatatgcgagcctgccgtatttagatgcgaaaaaaacatacaaatacggggattccggaaccaccgtcaccaatgcgcaaaaaatgctgaaagcgctggggtacagcgtgaaagtaaacggcacgtatgataaagcatttgaacaagcagttaaacaattccaagcaaaagagaaactgaaacaaacaggcattataacgggagacacaacggcaaaattgatgacggatctgcaaaaacagcttgcggacaacgatacacaaatgaaaaaagccgttgaaacattaaataagaatatgaaatagtaaaaaacacccgatgcgccgctcgcgcattgggtgttttttgtttgcgaaaagcccgtcttatgtcgtttcctgttcaaaaaggtggctgttcgcctgaatgaaaaactgtgattgctcatagtgataggtgacttttgagaagtcaaacggctggccgttggttaaatgaaaaatcgtttcaacgcatagcttaggcgctcctgtaaacagacctaagtactccgcttcttcctcatttaacatccccgcgtacagatataaatctgaaaaaccgcgctttaacccgagaccttctcgaatataatcaaatattgattctgccacgatctctttattcaaatacgtaataatcgatttgttgtaaaatgactcttcgatacacaatgtcagcccgtcaatatatcggattcgcttgacataatacacgtcgccgtcaggcggcatattcagattttgggcagcctcaggcgtgggttttctcacttccagcgctaataatttggaagtgacattaaaatcttcaagtgattctttaaatccctgattagaaagcagactgatatacccttttcttttattccgtctgacaaaaatgccgcttcccctcacttgaaacacaatcccctttttttctaataaatctaaggacttggtgatcgtgcttttgctcacgttaaaccggctcattaaggtttgcagcacaggcagtttatccccttgctgcagctgatgttcttctatgtatttttcaatatctatcgcgatttgctggtattttaacatatacattcctcattcatttattgtcccgcttctttcagaattatagcataatcgtttttaaaagccatttcgtaaattaactataattgtttatgtattgataaattataccggtacaattataatgaaaacgtataatatgaaaataaaggcaggcattcttctgcacttgcgaagcggatgcttgaagcggctgcagtgcatttattcggcatgcaagcggcagtcaaataaaggaggatataaacgatggggacattgccaaaagattttttatggggaggcgctctggccgcccaccaatttgaagggggatggaataaaggcggcaagggaccgagtgtagtggacgtcatgacggcaggcgcgcatggtgtgccccggaaaataacagatacaattgaagagcgggaattttatccgaatcatgaagcgatcgatttttatcatcgttataaagaggacatcgcattattcagcgagctgggtctgaattgtttaagaacgtccatcggctggagcagaatttttcctaaaggtgatgaagccgagcccaatgaggaaggattggctttttacgaccgggtgtttgatgaattgctgaaacatgggattgaaccggtaatcacgctgtcacattttgagatgccgctgcatttggcgagagaatacggcggtttcagaaacagaaaaacagtcggattttttgtaaaattcgctgaagtgtgttttgaacgctataaacataaggtgaagtattggatgacgtttaacgaaatcaataataagatggatgtgaataatccgatctttttatggacgaactcaggcgtcgccgtcaaagaaaacgaaaacgcaaaagaagtcatgtatcaggccggccatcacgaactgctggcaagcgcattggctgtttcgaagggaagagaaatcaatcctgagttcaggatcggcgcgatggtatcacatgttccgatttacccgtactcatctcaccccgacgatgtgatgctggctgaagaaacgatgagacagcgttttttcttcccggacgtgcaggttcgcggatattatccaagctatgcgttaaaagagtttgaaagagaaggctatcagatacactttgaagacggtgatgaagagattttgaaaaacggccgagtggactacctcggattcagctattacatgtctacaaccgtaaaaagtgatgtatcaaacgataataccggagatgtcgtaaacggaggattgccaaacggcgtggaaaatccttatattacagcgagtgattggggctgggcgattgacccgaccggtttacggtacacattaaaccgcttatacgaccgctaccagattccattatttatcgtggaaaacggattcggcgccatcgacacattagaagaggacggttcaattcatgacactccaagaattgaatatttatcgtcacatataaaagctttgaaaagagcaatcacatatgatggtgtggatgtaatgggctatacaccatggggaattattgatatcgtgtcatttacaaccggagaaatgaaaaaacgctacggcatgatttatgttgatcgggataatgaaggcaacggttcaatgaggcggcttaagaaagactcatttgaatggtataaaaaagtgattgaaacaaacggctcatatgtatcttaaaggtgtaaaaagggaaggcttcaccgttgtgtgaagccggctttttatcagtaattttgaaagcgcattcattcaagcgggaaggaggtgactgtccggctattcaattagaatcgcttataaaaataaggaaagggatggtggttcatgttttttaaaaaaggtctgcacataacgctggtttttcttatgtttttctttttcatatcaagcagcatggaaaccgaagtgtatgcagctgatcggaaggcttcagacaaaaacaaagtaagggtgtggttcagttctgaaaaagatccggcttcccgtacgtggtatgacgggccgctagaagtgaaatacgccttagacgaacaaacaccgcttacattgacaaaaaagaaggcttctgactccgccgctgtgtatattgatccgtcgcgccgctatcaaagtgtgttaggcgtaggatcgtccctggaagaatccacaatccataatttatcaaaaatgacacccgcaaaaagaaaagaagtgctgaaaaaactcgttgatcccaaagatggtatcggaatggacgttatgcgcataacgatcgggacatctgattttacagcacaggaattttatacgtatgacgatatgcctgaaggccaaacagatcctaagctccgtcatttctcgatccaaaaggatattgatttacacattacagcaaccatcaaggaagcgctggcgataaatccggaactgaaaatcattgcctcaccgtggagcccgccggcttggatgaaaacgaatgaaaacctcaagcggggaaagctgaaagataaatatatcggcacactggccgtttacttccgcaaatttattgaggcgtacgaaaagcaaggaattccgatttatgcgctgacccttcaaaatgaacctttgctggaaatcgactatccgagcatgtatatgccgccgtctcagcagcgtaaactggcactggccttaaaaaaagaaatgaaacaacacgtaattgacacgaaaatttggatttatgatcacaatgcgagcggggcgtggaactatattccgccgattttagatgataaaaaaggaaaccgggcggcagacggcatcgcttttcacgattatgacggtgacctttccgtcatgtcggaaatcggaaagagatatcctgataaatctattcacttaacggagcggtctgtctgggggacggcaggggcggaccggatcgcgcagtatttccgcaatggcgcgtcgagctacaatgcgtgggtgacgatgctcgacagtcaaatcaagacgcatcattggataggcaccccagacccgacgctgtttattcaggatgctaaaaaccctgaccgctattggaatatcccgatctttcatatgacaggcaacttttcaaaatttatcgaccggggagcaaagcggatagaaagtaattacggctccaaaaacacagtctcgaatgtatcgttccttaatcctgatcaatccattgtgacagtcgtaatcaaccagacatcttcagaacaaaaattccatgtcgtttcagaaaatcagcagtttgaagctgtcatcccagctaaaactgtggctacctacaaatggaagtgaaaaaagtaaaaaaccggcacatttacgtgccggcttctttctgttaagcgcctttttggttcagttgatcagaaggcgctttattgaataaaccgtctttgacggcgtttgaagccgctttttttacaaaaaacgggttgaggataataacggctgccatgttagcggtcaaaccccaaaagccttcatatataccgtgggcggattgggtgatatttaccgtgaatgtcacgataagaccgacgagaagaccgataattgtcgcttctttcgtttgattcttccaaaacagactgacggcgatagccggaaagatctgaaccatgccggaaacaccgagaagctgaagggtaacgagcgcggtcgggaacagcatgccgaataaaagcgcgagtccgatgacgacaaataccattgaacgggtgatcatcgtcagcttgcttggtgacacattcgggtgaatcaaatcccgatataagttattcgcaaataagtttgatgctccgatggccatgatagagcagggaatcaatgacgcaagggcaatcgtggagtaagcaaagccctgcgcgactccgccgtaagacgtttgaatcagcttcaataaagcaagccgcggattggtatcttccggcaggacaagaaacgcgataaagccgagaaaaataacaagaatcaaaacaatattataaagcggcagaaacatgctgtttttgcggacggcatctgcgctttttgccgtaaatacgccggttgccgcatgcgcccacataaagagcgccagcgcagatacgatggaagctgtgataaaccaaggaattcctttcggccccgagtccggaatcgtcagcatttgcggcgctttttcagccaaagtgtgaatcatcggcgtccagccgtgaaaatggatcagcgggagtgacacgaccataaacagcataatcacccacacgagaatgtctttaataatcgccgtaaacgtcggccctttaattccgctgaaaaaagtataaagcgctacaagaataaaagagatgatgacgaccatattgacattaatgacacccgttccggccacctgaagcgtatcttgaattccgctcagctggagacaaatataaggaatgagcataagaacgccgacaatggcgacaagactggccaaaagtttactgtcaaaacgctcacgggcataatcggcaagcgtcgttaatttgtgtatttttgccactttccacaactttggcagaaagaaataagcgataaaatacgccaaaacagaatacgggattgcaaaaaaagcaacgcttccccctgtgtaggctgtgcttgttaagcctaaaaacgtataagccgtatagagatccgcgccgactaaaaaccagacgaggagccccccgaaccgtctgccgccgacagaccattcctcaacagaagtgcgtgatgatttgtctctcccggctataaagccgatacagacaacggttaaaacgatgacggctgtaatgatcaatgctgttatatttgcgggcatcagtccagtcctccttgtttcttctgcagcctataaataagaaacgaacataatggagtgactgcgatccataaaagcagccagaaatgaaaaaaaggcagcccgataatgatcggatgaacccgattagcggctgacagcagggccagctggctgaaagggattaagatgagaacgaaaattagtgcttttctgaccatttactttcctcctgaaacttgataatgctccttatcatagcaggtgtcagataagatcacaagatatttttcagaaaaaaaagaattctattgcttttttaactgaaacactttagttgcatcttcattcatattaaattaaaatagttaatatctcgaaatcaagatatttaggagtgaatacattgaatacacaaggattgcaccatgttaccgcatttgcaaaagatcctgctgaaaatcttcggttttatactgaagtgctgggtttgcggctcgttaaaaaaaccgttaattttgacgacccggccacttatcacttctatttcggcaaccaaaacggagagccgggcacgatcattacattttttccttttcagggaagccgcccgggaaccgtgggaaaagggcaggccggaagaatttatttctccgtgccgaaaggagcactcgcgttttggaagtgccggcttgaagaaaacggcttatctgtaaaagaacagatcatgctgtctgaacaagtgcttctctttaatgatacagaagacctgccgcttgccataatggaagatgaaagaagcggacagagtgaatggactcctgcgggcattactgaaaaagaagcgatcacaggcatgagaggtgttcttctgtactcgtaccgtcctgaagcaaccattcaatttctcatagaacgcttcggttattcaaagacaggagaagaacagcagattgtcaggctgcaatcggaggcgcggatcggacatattattgatgttgaccttgcgccgaaagaagcaggtgtcggcggttacgggacggttcatcatgtcgctttccgcactagcaaaaaagagcaggcggagtggaaggatattcttgctgattctcatcttgattcatctgacattcttgacaggtcttactttacatcaatctatttcagggaaagcggcggcattttatttgaaatggcaaccgatgaaccgggctttatgacggatgaatcctttgaaaatctcggaacagagctgaagcttccggaatggctggaagagcatcgcagccagattacagctgttttgcccaaaatggagaaaggagaatgatgatgaaacatgtgtttgaacagggaacgtcagaaaatgttctgctgcttttgcacggaacgggaggaaatgaacatgatcttctgtcgctcggacgttttatcgatccgaacgcaagtctgctcggggtcagaggatcagtgtcggaaaacggcatgccccgtttttttaagcggctgaaagaaggcgtatttgacgagaaagatttaattgaacggacggaagaattaaagaattttattgatgaagcggcgcaaatgtacggattcagcagagaaaacgtgattgctgccggctattcaaacggcgccaatattgcagcaagtcttttgtttcattataaagatgtactgaaaggagctgttctgcatcatccgatggtgccgatacgcggagtgaagctgcctgatatggaagggatgcctgtgtttatcggtgcaggaaaacgcgatcctctatgtacaaaagaagaatcggaggagctttatcagtatctgacagatgcccatgcatccgtttctcttgtttggcaggagggcggtcatcagctcacacagcaggaagcagagcaggcacgaacctggtacagtgagcgattcctataaaaaacccttagtccgcttaagcggactaagggtttctttcatcttacagccaagttgacactttagatacaggcagccggttgcttttatgcgccggcttaacggctttaccgattgaaatcagcatgacgggcacgaaacgctcgctcacgtcgaattccttaacgaattgctctttattgaatccgccgatcgcgcaagtgtcgtagccttttgctttagcggcaagcatcagttgcatcgctgctaaagaagcgtttaaaaatgctgaatcacgggcaaactgatcattttggtatgcaccgttaatctggcctaaaagcgtttgtttaatctcttctgtgatattgccttgctcagccagttcagcataaacgtcttcaccattttcatttgcttttaaatcgcctaatacggcaataactgctgatgaatcaataatctgtttttgattaaaagcaaccggaagcagggcagcttttgcttcatcactgtgaaagacttgaaaatgccaatgctgaaggttccaggcggaaggcgcttgcgttgtgatttcaaggagttctgttaattcctcttttgtaatgaccgcgtctttatcgtattctttaacagatgcgcgttcctttaaaacgtctaatacggatgtcatcatgtttcctccttcggataaacgtgttatcataatagaaaagttagaagcttactaaatgtaactcgaaaactaattttaatggatcacaaaaaacttgtcaattcatagatgaagggatgaactcacgtgggatatacaatgtgtcctaaaatggaatccgctttttcccttttgggaaagcgctggaacggcctcattatccatgtactgatggacgggccgaaacgatttaaagatatgaccgaaacgataccgacaatcagccaaaaaatgctcgcggagcggctcaaagagctggaacaaaatgaaatcgtcgagcgtcaggtgctgcctgaaacacctgtcaaagtcatttataaactgactgataaaggcttggccctgcaagccgtttttcaggaaatgcaaaaatgggcagacagtttttgcgagcccgggggatctgccaacgacacatgtgatgaataacaaaggctgcccaaggcagccttttcttaatgatcatgtttactcttcataaaaaccattaatatcaaaattgttcagattgaggttcaagccttttaattgctttaataaagcatcgaatgtaaggaaatgatcatttttacattccgccgggacatcatttggagaaaatagtttcattcctccctcaatccactgtttccggtataactgaaatgccgcttcaattaaatgatcaggcgttacaataaaccctaagcttatttcatggtcctcgctgtagccgaattcaaacccgcagcaggggcaaatatcaaatgttttttgatattcgccgttataaacgggacttgtctctaatcctttaaatccgcatatcaaacaagggtacaactcactaaccaacatacatccctcttttattcagtttgcaatcattcagaacaagcggggaggccttttacagtttcccggttaaaaactgagcctcaccaagcccgaagctccaatcggcgttcccgttttctgtaatggaaatcatgatgtcctcgggtgatatgccgcattctgttttaagctgatcagccatcagttgatataacgtttctttttgatgttcggtgcgcgctttgctgacaatgctgatgatgacaagatctttgcttcttttgaaaccgagcccggtatcttcaatgataagctcatgaggccgatgctggtgaacgatctgataacggtccgttacagggacgtcaaaagctttaaccatggcgtaatgggcggtatccagtaatttttttaatgctgcgtcatcccggccttcaataacgtcaaaacgaagtaatggcatattttattccccctgatggttttttatcatgtcgcaacttgtaaaaaagtataacagttaatcaaaatgtaatcaaattataaccaaaatatttatacattaatgcaatatcacagagaggcacatgttgttacaatcgcccaatcaatttcctcattttatgaatacgcttaagaataggcagacataaaggaggaaaaacatgtaccctcgtcatgcattgtatcgcgggaatttcggtcctgccggatttccggcgagaagtccttttttgttcggcgctcctttattcggcggatttttaggcggtcttctcggaggcgtgattgccacaggctttacaagaccccgctatccgtacgggttcgccggttacggatacggaggcgtcccatacggcggtttcgggccgggagccggcggttatccgccattttattaaagaaaaaacggcctgcatcgcgcgggccgtttttttatcttaaaatctccacttccgatagattgtagtcttcctgttttgaaaacataacttcaatcatcccgtctttatagactgcttttgttcctttccgtttgacgaggctcggaaggacgatttctttttttccttctcccagactgctgttctctacaacgaggctgtgtgacgtatgcttaatcctgatacggtcgagttcctcttgttctgcgggaattttcgcaaaaacatgatcggatgtttcaaaaaggtcaatttccggcttgggcggctccgcttcgaccggatcggcctttttggacattgggtcgcgaaaagggaactgtccggcataaccggcgccgaatacgctttccatcactcggttgacatatgtctcgacatctttcggatcagcatttttaaacgtttctttagagaactgattttggaagggaaaatatctgttccaatcaaacacggcatctcaccctttcttaacggacaacatagtatatgcccgccggaagcttcccgtgatataatataatctgtttacagaaaggaaggggaaagccgtgcaagggaataacgcaagaaaaggaatcatttataccgcttgttctttcgtcatgtgggggctgtttccggtctattggaaacttcttgaacaaatacccgcattggatattttagctcaccggattttatggtcatttgttttcatgtgtgtgcttttaactgtgcttaagaagtggaaaaccggatggcgtgaactgcgtcttttgaaatcggaagggggcctgctggcgctttttttcgcttccgttttaatttccgttaattggtttgtgtacatatgggccgtcaatcacggctttttgcttgaagcaagtctcgggtactacattaatccgctcgtttccgttcttttgggcatcctattcttaaaagaaaagcttaacaagatgcaaacagcagccgtttctattgccggggcggccgtgatcatatctgcgtttcaatatggcgcggttccttatatcgcattgctgcttgcattcagcttcggcctgtacggcttatgtaaaaaaagaacccgcatgtccagcacgatcggactgacgctggagacgcttttgattaccccggctgcacttatttatttaggatatacagctgacgggagcacttccgggtccttgggggcaggaacatgggcgctcctatttttcgcaggcgtatttacggccctgccgctgttgctgtttgcagagggggcaaagcgtctgccgctgtatcaagtcggcattttgcaatatatagcgccgaccattacccttatgctcggcgtatttgtgtatcatgaaccgttttccgggcaaaaagcgtttaccttcatttgtatatgggcagcattgcttttgtttaccttttcacagataaaatggaagcggccgataaaaagccgctaagcctttcgctttccagcgatagcttaaattatgtataatcattacgagtatgtaaaggagctgtacaatgggcactgataaagacatagcaaaagcctatcaggcactgtggaataaccgcactctcccggcttcaactcttgaagaagcggagaaggcaattgatcttgaactgcttgatcaaagaacacatccgaggctccggaagtcacccgaggaaaagtttgctctggcggtgcagcgaattgtagattcccggctgcggccgattgagaaatatgaattggttgaactacatacgaagcgtttgcaatttttaaaagaagaaagaggggagcagctatgaaagcgatcataaaagaagatgtgcaaacttctttagagcgatatgccgatcgtcctgtatatatccatttggaaacaacgaccggttcttattcagcgcatctgaatgagaaaaacatgacggttgtagcctatatacgcaatgcaaaagtgacgtaccatcaggcgaaaatcaaaggaaacggcccgtaccgcgtcggtttgaaaacggaagaaggctggatttacgcagaaggtctgactgaatatacagtagatgacgaaaaccgcttgttaatggcagggcatctgccgggcggaaaattggcgatttcgcttcaaatcagcgaaaagccgtttacagtttaaagaaaagggtgaaaatcatgaaagaacatgtactcgtcatcctgcctcaccctgatgatgaatcatacggagtggcagggctgattgctttacacagacaaaaagatattcccgttacgtatgcatgcgcaacgcttggcgaaatgggccggaacatgggagatccttttttcgcgaaccgtgaaacactgccgctgttaagaaaacaagagctgatcgacgcatgcaaagcaatggacgttactgacctgagaatgctcgggcttcgtgataaaacacttgaatttgaagatgacgagtggctcgctgatatgatggaagagattatcgacgatgtaaaaccgagtctgattgtcacattctatccggagcacggcgtccatccggatcatgatgcatgcggcgaagcggttatcagagcgctttacagaaagaaaaaagaggaccgcccgcgcacgctttgcatggcaatcacccgcaacagggaggaagccgtcggcaagcctgatgttattcttgatattaaagaggttgccgatattaaaatgaatgccttaaaagcgcaccgcacccaaacggaaggcatgctgagagagctggaagaaaaaataaaaaataacgagccggttcttcagacatggtttgaagaagaagtgtattggacatatccgtggaaagactgataaaaaaagggataaggctgaaatgccttatccctttttttgtgtcagatcggaagcgatcgcttctgcaagcgaagaccttattgataaatttgaaaaactcagtcccagctgcactgcggtttgggcgatttcaggacggattccggataatgtcgctttcacgccgagcattccgagtgattcaattaaggtgaaaagctgttgggcaaccatcgtatcaatcatggctacgcccgataaatcaatgtacagctgcgtgatgcgcttctctgaacactggtgcagcgtattctccaaaatcattttggctcttgccgtgtcaatatccccgatcagcggcagcagtccgacattgtcaaaaagcacaattaccggcgagctcagctcggtaatcaattctttttgcgcttcaagctgaatgtttgtgtttttatacatttcctctatgaaaatatgaatgaccacatcaaaagatttaatcagcgtatggaatatatcttcggcatcttcttctgtcacggtgtctgaatgaagtctggtaaactgcttgacatggccgacatacaaatcacgaactctgataaactcgcgaataatataatggatgggagtttttaaatgttctttatcccgtgcggcttcaaacgcccacttttccaatgccgctgtatatacttccttctcttcagaaaaaatccgattgagttgataattaaacgccagattttgttttttcagatttgtgagtacagccgggtcagtagaagcataaacagaatcaggatccgtttcatgaagcgtatcaaaccatgtctgactgatgtcctccgcccgttcagttaaataatcgtacagcagtttatgttttggcattgctgctcctcctttataaaatcgtcatttttttcacataacgcttttgcagcttcatcagtctgaagaataaaccgacagctcctgcggcaagtcccgcaattaaaccgatccagtagccgtatgccccgaggcccgtataagtgccgactgcgtaaccgaccggaagcccgataatccaatacgacacaaaagccgcgccgagtgtataattgacatccttatatcctctcagagcgccttgtatcggagctgctacggcatcagaaagctggaaaaacagcgcatagattaaaaagtgctgcgtcaacatgagcaccgccggatctgatgtatacattccggcgatttgcggtctgaacagcaaaatgaaagccgccgtgcataaagaaaaactaagcgccatcacgatcccgatatagctgtatgagcgggcatccctgtagcgctttgcgcctgcttcaaagccgaccaaaatggtcatggccatggatacgctgagcggcagcatatacaagagggaagcaaaattcattgccgcttggtgggctgcaatcgtcaccgtctgaaaatggctcataagcagtgtgacagccgcaaaaatgctcgtttcaaaaaataccgcaaaaccgataggcaatccgattttcaaaagcttcctgcattcagtcggagaaaaacggtacagtttccgaaatacagagtacccggcaaacggctcaaatctgcagacgataaaaaagctgatggcgcaaatacaccagtaagtcagggcggaagcgagccccgccccgactcctcccaatgccggcatgttgaatttcccgaaaataaatacataatttaaaacaaaattaataggcaatgagcaaagcgtaataagcatagtgactcgcgttttgccgagtgcatcaataaacgagcgcaaaacggtgtacacaaacaaaggaaaaataccgagggataaaaatcctaaaaagtgtttggcgatcgtccggacacgaggttccaggcccaaatgtcccaagatcatatcaacggtgaaaaagccgatcaggataaccgccgcactgagaacggccgctacataaacggcctggatgacggaaaacggcacttccttttgtctgccggctccaaacagctgcgaaacaacgggcgtaacggccattaatattcctgccaggcccgtataaaccggcgtccacaggcttgaaccgattgcaaccccggctaaatcggcagcgctcactttccctgacatcaccgtatccaaaaaggtgatcagggaaaggcccgcctgtgtgattaaaatcggaatgaagatatgtaacagctgtctgaccttttggccgatcgtgttcgtttctctcaagttaggttccccgtttctttattttaacgagagaaattataacattttatgtataaaaagcaatgaaagccggcctactcttttttgtccggtttcggctttttaaacatcttggcataaatgaatgaaagtgaaatgacccctaaaaaggtgcagatatattgcatcagccgtgcgaattccatatgatgtgcgcctcctttcatgattatggtgcacacagcggcgcatatccatgcgcgcgatgcagaaaataagggaaaggagctgatgtgacatgcgccacactcaaatgacggaaagcgcgtttaccgctgccgttcaaacgtatttgaaacaaattacggaggatgccggaatgatactgcggacattggatgaaaaagaccaatgccttctttgcgaattagatgaactgggacatacgtttcaggaaatgcaggctgtcgcttcgtcgttttacctgcagtcatatatcgaacactttacgccttcctatacagagctggcgagggccgtgcagcatctggcggaagaaaaacacggagcgctgattgtgattgaacgtgcagatccgctggacggaatgatacaaaaagggaccagcctgcatgccgagatcagtgcagctttaattgagagtattttttatcccggcaatccgcttcatgacggagccgtattggtcagagaaaaccgggttgtatcagcagccaatgtgctcccgctcacaacaaaacatgtcgatctcaaatacgggacgcgccacagggccgcgatgggactttcggccgtgactgatgcactcgtgctcgttgtttcagaagaaacgggaaaaatgtcctttgctaaagacggcggactgtatccgcttgtttcgccgcgggcgcttcatacgaaataataagaaaatgggaatattgtacccatttaatattaataaggtgaacatctttacctttttctgtattgatgttatcgtttaaatatacataaaatttaaaagaatagggagtggaaagatggcaaatgtattgatgatcggctttccgggagaaggccatatcaatccgtctttaggcgtcgtaaaagaactgaaggcaaaaggggaacatgtcgtatattacggcgtgaaggaatatgagaacaaaatcgcgtcaagcggagcggaattccgtgaatatgaagatttccgaaaagatgaattcggaaaaaatgcaacgggtgatgaacagcgggacgctaccgagtttttgctattaatgattgagacttccaaaaaagccgcactccgtattcttgaggaagtaaaagatgaatcctacgactacatcctgtatgatcatcattttctggcaggaaggctcgtgagaaaccagctgaaactgccggcatattcactttgtacgacatttgcaatgaatgaagcatttattaaagaagtgttttcaaatacaaaccttgtatcagaggaatcatctcattatccggcttataccgaagcggtcagccggctcaatgaagaattcagcgcagacattaaaacgccgtatgatattttctcaaatgacggcagaaaaaccatcgtatttacttcaagagcgtttcagccgaaagaagaagagtttggcgattcttatctctttgtcggtccgtccataaccgaaagggcggcggctcaagatttcccgtttgaacagcttgaaggagaaaaagtcctgtttatttccatgggtacgatttttaacaatcagaaggaattgtttaataaatgcttaaaagcggtcagaaactttaacggaaaagccgtcatgtcaatcggcaaacatcttgatccggcggagcttgatgaaattcctgagaatgtcattgtcaagccttatgttccgcagcttgagatcctgaagagagcagacttatttatcactcacggcgggatgaacagtacgagcgaagggctttactacaaaaccccgatgattgtcattccgatgggcgcagatcagttcgccgtcggaagccaagtggaaaacacgggcgcgggcaaaatgtttaaaaaagaagatgtaacagcggaactgctcactgaagcaataaaagaattgagcgaaaatcctgaatatcagacaaaagcttctgaaatcggagaatccctgaaagcggccggcggagcacagcgtgcagcggaattgatagcagaagacgtgaaaactgccgagacccgggttctgtaatcagccgtcacccgcttcctttaaaggaagcgggctttttttgattgtttttcgggaggatttttcacgccataaagagaattgtatgaaaaacagacaagaaaggtggaatgtcgcggaaaaaagccatgttatgaaaatgattccaaagtcttttgtgaaatgttctcaatttatgtaaaatgtgtggcattggtgatgatctaaggccaaatgaatcggaattaatgtcgacttatgaatgaatcctgaataacaggcggcgtccaaagaaaaggaacgtccctttcagcaatgataaataggaggtttttcgttatatgaagaaaaaaatcgcagccggactggctgtatctgcagtaatgacttcaaccttcgccgtgcatcccgctgaagcaaaaaccattcaagtaaaaagcggcgactctctttggaagctttcccggcaatatcatacaagtatttcagccctgcaggcggaaaataaactgaaatcaacgatactccacccaggacagcggctgcacattcctgacggcagcggcaaaacggggcaaaagggaaaacgaagcacgggtgcttacacagttacatacggcgactcattatgggtaatcgcaaaaaaatacaaaatgagcgtttctgagctgagaagcctgaaccgtttgagttcagatgtcatctatccgggccagaaactgaaaattaaagggtctgccggcggcacggacggaggcggcagacagacaaagcctgataaaggcgcatcagggacttacactgtgaagccgggtgactcgctgtggaaaatcgccaatcaaaccggcatcaccatcgccgaactgaaaaagctgaatcaattaacatcagacatgctgtatccgaatcaagtgttaaagatcaaaggttcttcacataacggaaacagcggcacaacaccgccatctcattcaaatccttctgagaagccatccacttacaaagtaaaagcaggcgattccctctggaaaattgctaatcggttcggcatcaccgctcagctcatcagagaaaaaaataaattgacaactgatgtgcttcaaatcggacaagttctggtgattaacggaacgggaaaaacagaagatcctgtgcggcagccggataacaaaccggcaaaaccaaacaagccgaatactcccgaacctccggtgacagggtcaaagattgacagaatgataggcgaggcgaaaaaacatgtcggcgtgccttaccgctggggaggcaatacgcctgcgggcttcgattgcagcggttacatctattaccttttaaataaggtaagctctgtttcccgtctgagcacggccggatattggaatacgatgaaacatatcagccagccgtcagcaggcgactttgtcttctttacgacatataaagcgggcccttctcatatgggaatgtatttaggcggaggagattttattcacgcaagctcctccggggttgaagtttcaaacttaagcaatccgtattggaaaaaagcttatttaggagcgcgcagttatttttaaaaaaagcctttcggggctttttttgtttaccatttttacgttttgacaagactgatgggtaaaaaataagggggaggaagcatgaatcgtctcttgctttttctcatgctcgcatcaattacgctttgcggctgcgctcctgttccgcccaaaaaacatggggaaagccgcgcattggaagcatctgcataccgtgagcatgccggactcatcaatcaaaacggaaaaacgatcggatatatcgaagtgagggaatctgatgatgaagggtcagacattcatatatcagcggggcatctgccgcccggcacttctctcgggtttcatatttatgaaaaagggacatgtcaggcacctgatttcgaatcagccggcggtccgttcaaccctttgaacaaagaacacggcttcaacaatccgatgggtcatcacgccggggatctccccaatcttgaagtgggggctgacggtaaagtggatgtcattatgaacgcgccgcaaacttcattaaaagaagggagcagactcagcctgctcgaccgggacggaagcgcgttcgtcattcatgaacatacggacgattatttgacaaacccgagcggaaattccggagccagaatcgcctgcgctcccctgacaaaaagcgcccgcagggaatgagcccttttgtattgagtatacaagggcttttttagtatactcggttatggaatacaaatggaaaggaaacaccacctatgacttcagaattacagcacctatcacttccggaagatatacaaaacaaactgcaggcttatcaaaatcatcccgtttcccaagaattccgggatttaatcggatcatcaggctatgaggccgaagataaagcgattgtattcgatgccgtcattgctttgacaatgggaaaaaatatcttattaaaaggaccgacgggttcagggaaaacaaaattggcggaaacgctttcgaactattttcataaaccgatgcacagcgtcaactgctccgtagacctcgatgcagaagcgcttgtcggctataaaacgattgaaaatgaacagggacaggcgacaattgaattcgttcccggacctgtaacaaccgcaatgaacaagggacattttttatacattgacgaaatcaatatggcaaagcctgaaacccttccgattctaaacggcgtgctagattacagaaaaatgatgacaaatccctttacaggagaagtgattaaggcaagcgaaggattcggtgttatcgccgcgattaatgaaggctacgtcggcaccgttccgctgaacgaagcccttaaaaaccgttttgtcatcattgatgttccgtatattaaaggaagcctcctgaaacaggtgctgacctctcagtctgtcttaaaagatgagaaattaattgagcgttttatgacgctgtcttctgatttaatcgcacaagcgcataacggacaagtgtcagaagaagcggcgtccatcagggctctcattgatacgtgcgacttggctgcgtacatcccgccgaaacgggcgattgaaagaggcatcgtagaaaaacttgacgatgacagggaaaaagccgctgtcagaaatattgcagaaacgctgttcgaatgagggatatacaatgaagtttatcaaatttaacgacagcacgattgattcgtttttgttcatgatgctgactgacctggccaaaacactgaccagaagcagtgaagttgaagtggaatacggcgtgcagtcttactacaatccctttgaaaagaaaatttatatgagccacttttggaaagaccgatcagccggggatatggaagccggcctgaaaagcgatgtctatttgcgcgctgtcggaacacgcagcagctcatttcgggaatttgcggggtttttaaatgacgttcaccggcatttcacccgccaaagctttgccaagcagctgtttatgctgcttgaggatatcagaattgaagagctgaccaaaaaagaacggccgggaacgaaacgtgtttttcagaagcggagggagatgtacaggaaatatttcacgacgcagctgacattgaatttagaacggagcattttcaccgacgctttgtattgcgcgatgtttgtcaagctgacggctgagtctccgcttgaaggcattccttccatgcatgaacatattgatatgatgataccgtatattgaacgtcagctcatccgggtgtatgaggcggattctacggaacaaatcgcaagaataacggaagacctcatggaaggccttgatgaagtgcttgagaaagatatgctgaacacgtacttttttctgccggaacttgattacgaaaaagcggctgaagagcctttattcgaaagtgtaaaaaaagcgccttcgttaagtgacgatctcacgctacctgagtcttccgacggagatgaagaaatctttgaagagaaaatgaatacgtggcaccgggaaaccgaagcgccggcaaaaagtttccttcaatttgatattgagcacggcgcgaaatcggatcttgggaaagacgcggccagagaaggcgatgacggtgaccaggcgctcggctccgttcaaggttccgcacgtcagacgaaaagagaggattactccaaactggaagcgcttgaatccattcaggatgaacatgagggcgcggggctggctgacggaaaagaaaacaaatttgccttcccggtttatcaaacgcctcataaagcgtctcctgaagaggagcagtcttataaagaacaggcaaaaacgatagaatcatatcaaaaacgcttgaagcagatgatacaaaaaacacttgagcacaaaaaaacgctcccgcggaccgaccttcacgcaggccggctgaatcgcaaactgatccgctattttacggagcggaacccgcgccttttctataaaaagcaggacccgtcttcagacattgacgcggtttttacattgcttgtcgattgttcggccagcatgttcgacaaaatggatgaaacaaaaagagggatcgttctttttcatgaagctttgaaatcagtgtccgtaccgcaccagatcgtcggattttgggaggatacaaacgaagcgaccgaaacgagccagccgaatttcttcaataccgtcattccgtttgaagagtcgctgctgcaggcggcgggtccgctaatcatgcagcttgcgcctgaagaagataacagagacggatacgccatcagacaaatgacgaaacagctgatgcggcggagtgaggcgcaaaaatttttaatcgtgttttcagacggagagccggcagcattcggatacgaacaaaacggcatcgtcgatacgagcgaggctgtcatcgaagcgagaaaaaaagggatagaagtcataaatgtttttctgtccaatactgcaatagaggaatcacagatgaaaaccattcaggatatgtacggaaagtacagtatttttgttccggatgtcgatcagctgcccgatgtgctgtatccgctcttgaaaaaactgcttcataaaagcataggataggctttttcctatgctttttcgctttttattttaaaatgatttaattttttcggtattgatctgttttttttactattttgtgaacaatcaaggtagaatccaaacgcaatcagtggtaaaatatccttggaagcgtttttattacataattttgggcacagcgttcaaaagttatttcaagatagtgaattgatcacttgattatctaggttgggggtaatattcaaatgtttcaaaataatatgaaacaaagaatgaattgggaagatttttacggaccgaacctcggctacgcactggagctgtacgaccaatatgctgaagatccagacagcattgatccggatctgaaagacatgtttgacgaactcggcgctccgccaagccaaataaaagaggcatcgggaacaaaggaacagggacgcgtcaccgcagatctgattcaaaagatcgcagcagcagttaaacttgcagaagatattcgaacctatggccatctgaacgcttccgtcaatccgctcagaaaggatccgaaaaagagcgagctctttccgttatccgagtacgggcttacagaagaagaaatgaaagcaatacccgcgtctgtcatctgtaaggacgcacctgccaatataacaaacggcttagaagccatccagcatttacgcaatacctataaaagaaccatctccttcgagtttgaccatgtgcatgatttcgaagagcgcgcatggattacaaaaatggtcgaatccggagaactgttccggaaaaattcaccggaaaaactgtcagccgttttagaaagactgacggaagtagaaggatttgaacaatttttacaccggacattcgtcggtcagaagcgtttctcaattgagggattagacgcgcttgtgccggttcttgacgacattatcgcccagtctgtgaaagcgggcacaaccaatgtcaatatcgggatggcgcacagaggccgtttaaatgtgcttgcgcatgtgctcggcaaaccgtatgagattattttctcagaattccagcacgcgccgaataaagaccttgtgccgtctgaaggatcgaccggcatcagctacggctggacgggcgatgtaaaataccacctcggtgcagacagacagcttcaggatgctgaaaccaaaagcgcgcggattacgcttgcaaataacccgagccatttggaattcatcaatccgattgttgaaggaagcacgcgggcggcacaggaaacaagaacgcaaaaggggtacccggttcaagacgaaacaaaatcgctcgccattttaattcacggtgacgcagcgtttccgggagaaggcattgtcgccgagacgctgaacttaagctctctgaaaggctatcaggtcggcggggccattcatatcatcgccaataatatgatcggctttacaactgaaagcgatgaatcacgatccacgaaatatgccagtgatttggcgaagggctatgaaattccgatcgttcacgtcaacgcggatgatccggaagcatgcctgtcagccgttaaatttgcggttgaataccggaagcggttcaataaagatttcttaatcgatttaatcgggtacagacggtacggccacaatgaaatggatgagccgtcaacgacacagccgatgctgtatgacgccgtcagaaaacacccgactgtcaagcggatctttgcggaaaaactcgtaagtgaaggactgatcagcgaggaaaaagcgcaaaacatcgaaacgacagtgacaaaacgaattgaagacgcctataaaaaggtgcccgccaaaaaagaagacgccgtacgggaaattgaattgccggaaccggtgtccaacggttttccagacgttgacacagccattgattttgatgttctccgcaagctgaacggcgaacttatcaactggccggaatcttttaacgtgttcggcaagctgaaaagaatcctggaaagacgtgcaaaagcgtttgatgatgaccgtaaagttgaatggtcattggctgaatcgcttgcgtttgcttccattttgaaagacggcacgccgatccggctgaccggacaggattcagagcgcggaacgttcgctcaaagaaaccttgtgctgcatgacagcgaaacaggagaagaatttgttgccctccatcacttagacgactgcgctgcttcatttacggtgcataacagcccgctctctgaaggatcggttctcggctttgaatatggatacaacgtgtattcgcctgaaacgcttgtgatgtgggaggcgcagtacggggactttgccaatgcggctcaagtctattttgatcaattcatatctgcaggacgggcaaaatggggacaaaaatcaggactggtcatgctgctgcctcacggttacgaagggcagggccctgaacactccagcggccgcgtcgagcggttcctgcagctggcggcggaaaacaactggacggtggccaacctgacaagtgcggctcagtatttccatattttaagaagacaagcgaaaatgctgcttcgtgaggaaatccgcccgcttgtgatcatgacgccgaagagcctgctgcgcaacccgaatacggtatctgaagtgcaggaactgagcgaaagccgattcaagcctgtctatgagcagtccggtctttcccatgcttacgaaaaagtgactcgcgtcgtattatcaagcggaaaagtgtcaattgatatcagcgatcacttcaacaaaatggaaggcgataaggattggcttcatattgccagaatcgaacagctgtatccgttcccggcaaaagatacgaaggagcttttcgccaaactgccgaacctgcaagagatcgtttgggttcaggaagagccgcagaacatgggggcatggagttatatcagcccgtatctgacggaaatcgcgccaaaaggagtaaatgtccaatacatcggccgaagaagacgatccagtcccgcagaaggagatccgacagtccacaaaaaagaacaggaacgcattgtatctgatagcttgactcgcaaaaactaagggggaaatgaaaaaatggcggaaattaaggtacctgaattagcagaatcaatctcagaaggaacgatagcccaatggttaaagcagcccggtgattatgtagaacagggtgagtacttgcttgaactggagacggacaaagtaaatgttgaattgacagcagaagaatcgggtgttctaaaagaggtattgaaagattcgggtgataccgtccaagtaggagaaattatcggtaccattacagaaggcgctggcgaaagttctgcacccgccccttcagaaagtgctccagccaatgaacaaacgaaagaggaagcaaaagctgaacctgctgcacaagaagtcagccaggaagcacaatcagaagcgaaatccagaacggtagcgtctccggctgcacgcaagctggcaagggaaaaaggaattgatctatcacaaattccgacgggagacccgctcggccgcgtgcgcaaacaagatgtggaagcttatgaaaaaccggcttcaaaacctgcggcacagccgaaacagcaggctccaaaaacacagcaaagctttgacaaacctgtcgaagtgcaaaaaatgtcccgccgcagacagacgatcgcgaaacgattggttgaagtgcagcagacttctgcgatgctgactacatttaacgaagttgatatgacggccgttatgaatctaagaaaacgccgtaaagaccaattccttgagcaaaacgaagtaaaactcggtttcatgtcgttctttacaaaagccgtcgtggctgcattgaaaaaattcccgctccttaacgctgaaattcaaggcgatgagctgatcgtgaaaaaattctatgacatcggtattgctgtcgcggctgaagaagggcttgtcgtcccagtcgtgcgtgacgctgaccgcctgacgtttgccggcattgaaagagagatcggcgaacttgcgaagaaagcgcgaaacaataaattaacattaggtgagctgcaaggaggctccttcacgatcacaaacggaggtacattcggatcgcttatgtcaacaccgatcctaaacagccctcaggttgggatcttaggtatgcacaaaattcagctgcgcccaatagcgattgatgcggagcgctctgaaaaccgtccgatgatgtacatcgctttatcatacgatcacagaattgtagatggtaaagaagcggtcggattccttgtcaccattaaaaacctgcttgaagatccggaacagctgttgctggaaggataatttgagacagacaaaaagtacactgcccttacaagcagtgtactttttttattgagagaaggggagaatttatatgaaaagctgttatccgcttgagatcgaatttgaatataatgaagaattgcattctatcactccggttcttctgcaagacgaacatgacacgatattaatagactgcggatatcccggttttacaaaccatcttcaacatgccgctgcccggcatggaatgtcgcttcattcattgacaaaaatcattgtaacgcatcacgacatagaccatatcggctcactcgctgcattataccgtttacatccggatgtcagcgtgacagtacatgagcgtgaagcgccgtatattgacggctctaaaaaatctttacggcttgagcaggctgaatcaacgttttgttcattgccagaggatgcaaagccttatgcaaaacagttcatccgctctcttcaatcagtcgaatcggctccagttcaccggacagttactgacggcgagctgctgccttggtgcggaggcattcgcgttgtagccacgccgggtcatacacccggccatatcagtctttatctgcctgccgaaaaaactatggtcacaggtgatgcggtcgtcattgaagacggaaagctgaaccttgctaatcccggctatacgttacatatggatgatgcggtccgttctgtgcagcggctgctcgattatgatatccgccaattgatttgttatcatggaggtttatttcagggggatgtaaaaaaagcgcttttgcgtctgtttcgtgatctgcagaataaacaaggataggagcggcagcagcctatccttgttcagttatgaaaacggaatctttgccgtttcttcttcttcggcgctgtttttctcttttttcttagaccagtaggtggcaagaacagaccccgacagattgtgccatatgctgaaaattgcgctcggcacggctgacaaaggggagaaatgcgctgtcgcaagcgctgcgcccagtccggagttttgcattccgacttcgatcgcaatcgctttttgtgaagcataatccattttgaacagctttgcagtcaggaatcctaacaaatatccgattccgttatgtaagatgacgacagacacaatcagcagtcctgattgaagcacatgctcacgatttacgctgacgacagaggatacaatcgctacgatgccgattaccgacacgagaggaagcgcgtgcacggcttgtccgacctgttttttgaagaacagcttcacaatcaccccgaggacgatcggcaaaagcacggcttgcataatggaaacaaacagtgagccgaaagaaacggggagccactctttcgcaaacagcataataagtgccggcgttacaataggagcaagcaatgttgagatcgtggtgaccgcaacagaaagcgccgtattgcctttcgccaaaaacgtcatgacgtttgatgccgtaccgcccggacagcatccgaccagaatgacgcccgcggcgatttctgcggggaggcggagcccgattgataaacagaaagccgtaagcggcataatcgtaaactgggcagcgactccgatcacgacatgccaaggctttctgattaattctttaaaatcgtctgcttgaagagtaagccccatcccaaacataataataccaaggaaaatcgtcatataagaactgatccaagaaaacaaatcagggcaggcgaatcctaaaccggcaaagacgataacccacaagccaaaggtttggcccgcaaacctgcttatttttttcagccattccataaacacagctccttttacattcaatcaatcagtcagaaaatatgactgacttttctgtattccattataaataattttctgaataattcaatattaaatataagttttcaataaaattattatgtaaactaacatcttcttgactattcagacatatattcttacaattgatttttatactgaaatgaattgggagtgctgaagtgaaagaagctaatcaatggtcatctaagctgggatttattttagctacggccggctctgcaatcgggctcggcgcaatatggaagttcccttacgtagcgggaaccagcggaggcggcgcttttctgcttgtttttattttatttactgttttaatcggactgccgcttttgcttgctgaatttattatcggcagaaaaacacaaaaaaacgccgttgaatcctataaggcgctcgcgccggggaaaaagtggcactggatcggatatctcggaatcattacgtgttttattctattatccttctacagcgtagtggggggatggatattaatctacattataaaaggctttacaggcggcttatcgctttcttcgggatttgatacgttatttatcgataccatttcaaatccttatgcagccgttttcggccagctgctgtttatcgtgctgacgattttagttgtggcaaaaggggtgagcagcggaatcgaaaaggtaagccaggtgctgatgccggctctgtttattctgtttattctcttaatgatccgctccgttacgctgcatgatgcagcaaaaggattaaaattcttttttatgcctgattttggcgcgatggatgccaataccattttatatgcgatgggacaatcatttttctcgttaagcgtcggagtgtccgtaatggttacatacagcgcatatttagaaaaagaagaaaatattgttcaatccgccgtatcggtgacggtattaaatgtccttgttgctgtgatggcgggagtggcgatttttccggcggtgtttgcattcggcctcaagccggatcaaggcccgcagcttttatttaacgtgctgccgaccgtctttaaccaaatgccgttgggcatcgtgtttttactcgcctttttgctgctgtttttatttgcgacgctgacatcggctttttcaatgcttgaaattttagttgctgttttgtcaaaaggcgattcggcaaaacggaagcggtatgcgtggatcgggggacttgctatatttattgtcggggtcccttcggcgctgtcgtacggaattttgagtgatgtttctatttttcaccgcagtatttttgacgctgcggattttctggtcagcaatgtcttaatgccgctgggcgcgcttttaattgccgttttcgtaccgctgaaaatcccgaaacagatgctgtttgacgaactgaaaagcggttccggtataaaacgaaaatggtttgcagtctggctcctattaatccgttatgtggctcctgtagccattattatcgtttttctgcacgtgcttggtattttttaaaccaaaagaagcaggcccccgttcaagacgggggcttttttaataaagcggccatatcacgcggtgcgcttgctcgaaccgtttctccgcctcccgccaatcaacgacattccaccattgatccacgtaagccgctcggtcgtttttatattgtaagtaataagcgtgttcccacacatccagcggaagcaaaggaatgacgtcccactggctgtagagctgatgcttctcagcggccaaaatctccagccgcccggcgcgcggcgcccagactaggatagcccagccgactccttcgacttttttcgccgcttgagaaaattgctctttaaaagcggagtagcttccgaatgacacatcaatcatttgaaagagtgcacccgtcggccgtctttttccgtttggattcatcgaaaaccagaaaatactgtgcaaataatggcccgcgccgtgaaacgccaattgccgcccccaatgtgccactaagtcgtactgtttcgtctgtctcgcttttttgagctccagttctgctttattcagaccgtcaacatagctctgatggtgtttggtatggtggagtttcataatctctcttgaaatatacggttccagtgcggaataactgtaaggcagtttagggaggacatgcttgccgatcggcacataagctctgcgctcatccggctcttcgggttcagtaatgtcccggtaaagtgctgatgcttgttcgtaccattccgcctccgttaatccatcatcctgaagggtgtgaaaaatccggtcgatttgtgccgcgaagcgatcgaaccgaccttgctgaataacttgttccttcaaggtttcacaccaattcagcatttcggtttgataagcgtgccgtttcatttttcttcctccttttcactcattttcataaaagtgctgagcgcaagcaaagaaaacacatacgggtagctgtgatacctgatgtaaaactgcttcggcaggccgattccggtcggatagctgaaagcggctccttcgtaatgccggttttcaataagaaaagatatgccttttgtgacggcttgatgatgagttttttcgtattgcagcaaagcttcggccgcccaagccgtctgtacaagcgtcccgtaagaaagcggaacataggttttctcttctgcgcttttacaggattccccccagcttccgtcctcgttttgaatggacttcagccagcggatcgcttttttcacggccgggtggttttggctcacgccgcaagccttcatccctgtcagcgctgcccatgtgccgtaaatatagcagacaccccatctgccgtaccacgatccgtcctcttcttgatggcggatcagccattggacggccttttcaatctgagggtgatcagaagaaagccccgcttctcctaaacagtgcagcacccgtccggttaagtcgcttgttgagggatcgatggcagcttcctcagccgattccagcggcagcaggcggaccagcggatgattgacatttttctcaaaagcagagaagccgccgtcactgttttgcatggacaaaagccagctcagtccgcgttcccatgaggcgggataaagttttcgcggaatggctttgagcactgcggctgtgtcatcacaatcaggattatttgtattgatgtttgaaaaaccccatcctcccggttcagcatgcggattgtgaacggcccaatcagcgactttcgtctgctgccgttcacgcagaaaccgggcggcgctggttatcatctgatcgttatctgagatcccgcttttcataagcgcatagttgagaagcgccgtatcccaaacggtcgacgttgaattttccaggtacggtatatcgccgcaagacgtgagcaaagctttcgtgccggcaagtgcttttctgataacgggggagtggcgcgatacaccgagagcgagcaggccgtacaccataaaaatagtggcgctcgcatagctgtataatgtgccgtcttcttcaatccggtcaagcatatacgttttggccgtacgcagaccgagctggtgaaaagcggcaggaatctgcaaaagccgcttccagtgcgcgaaaagagaagagaggtctctgttctcatcctgatcggaacgaagccatgtaaacggatttttagtcatatgccgatctaaatgcgcgagagacggaacgttgggatttttcagcgaaaatcttttgttaagcgtcacggccatcggtacaaaatgaatacgggcgtatgtactgaactggtaaaaatgcagcgggaaggatgggggaatgactaagaaagataatggcagatgcagcgcgggccatggataaaggccgtttgccgcaagcatccactttgtcatgaagtgtacgttgcgcaagccgccatttgagatgataaagcgttcggcctgaatcatatgcgcctcagaacggctatataaaccggaagccagcaagccggcatagccctgtacagtggcggtcacatttcctttccggtcatcaggatagttggcaaaagttccgtccgggcgctgtttagcgcgaatgccttctgcaagctcagcgatcagttctttatcattgtctccaagagaagtgaggaggaggatcagaaaggcgtttgtcaaaatcggtccttcaaaacaaaatgaccatgagccgtccgcattttgcgtttctcttaatagggagatggttttcttttggcggcttctgacgttttcatgaattgtgctcacactcgctcaactccttcagaagcatatatattcatatgtaaaaggcggcatgacaaaagaaagaaactgctgacaggcagcagtttcctgtttgattaatcttccagattgatccagacgcttttcacttctgtataattattcagcgcgtaagagcccatttcccgcccgaggccggattgcttatagccgccgaaaggagatgccgcatcgaaaacattgtagcagttgacccaaacggtgccggcttggagacggtcagcaatgtaatgggcgtttttcacattctcagtccaaagtccggctgcaaggccgtattccgagcggttcgcccgctcaatgacttcatctaccgtatcatacggaatggcggctaaaacagggccgaaaatttcttcttttgcgatggtcatgctgtcatccacatccgcaaatacagtcggggagacaaaatacccttcttcaaacgggcagctgccgcccgcgacagctttggctccttccgcttttcctttttcaatatatgaaagcacgcgctcatgctgttcctgactgacgagcgggccgatttgtgtatcttggtgaaggccggcgccttgctgaagcgatttcgcatatgaaaccatttcgctgacgacctcatcatatttgtctttgtgaatgaagacacgggagcctgcgcagcatacctgcccctgattaaacatgaccccgtttaaagcgccgggaatggctttcttcaaattggcgtcaggcaaaatgatgttaggtgactttccgccaagctccagtgtcacgcgtttaattttttttgcggctttttccatgatttttttgccgatttctgtagagccggtaaaagcgagtttatcgacatcgtcatggttggtcagcgcttccccggccgtctcgccgaaccctggaacaatattgatgacgccgtcagggaagcccgcctgatctattaattccgctaaatagagggcggtcagcggtgtctgctcggccggtttcaaaacgattgtgcagcctgtggcaagggcggcgcccattttccacatcgccataaggagcgggaagttccaagggatgatctgccccacgacgccgacaggctcatggcgggtgtaattaaaatatgagccggcgaccggaatcgtttgtccggttatctttgtagaccatccggcataataacgcatatgctcaattgcaagcgggatatccccattcgtcgtttcattaatcggttttccgttatcaagtgtttcaagctgcgcgagttccgttttgtgctcttccattaaatcggcaagcttatacatcagcctgcttctggaagcggccggcatagtgcgccattcgccgtgatcaaaggctttgcgtgccgctttcactgcactgtcaatgtcttctgtctgtgcctcgtaaagcgtcatcagcgtttctccggttgccggattcggtgtgacaaatgttgatcctgaagcgctaggaacaaattttccgtcaatataaagtttcttcgtgccctgtaaaaatgtttccagcctttttgtgatctgcatcgttaaagaactcattcgtaacaaacctcccgaaatttttttatggtctgttttgagcatcttgatgtccgcgcaaagtaagcgcatacagtcattctataataacagccccggtaaaatcaattgataaccgttattgcaattcacaagaaaaaacggctacaataagcttatcgattaagaaaaggagttttataaatgattcataataattggcagacaaaagaaagcgtcaaaaaggtcaaatgcgtacatacagatgcgaaaaaatacattgtcaaaaatgtgctgacgccgggtaaagagtatgaagtcaaaaatgaaacagaagaattcatttttgttgtagacaatacaaacaaagtcggaggcttctacaaagagtattttgaagaagtttaaagctgaatgaatttattttgcctgagccatactaaaaaagactacatataaagggtggctgcaaaatgaaaaaaacagagcaagacaaacaaaataaaacatcagatcagcttcagcaagtgcaacctgaagaaggcaccgacacgacgatggaacaaatttcagatacctataaagaaggaacaattgaagatacggatcgttgatgttttgttgaaaccgcggcattggagaagccgcggttttttatggcgaagataaaaaactgacttttcgaaaaaaataccgttttcttgaaaccttttctttcgctgaaccgtactacttcataaaagcggcacctttcgcgaagggcttttttgatgaacgttctaaaaatgtaatctgttcgtaatggtttaaatgccgtctatgtcgtattcttatatagggataaagaacttatttttttatgattgtaataaaacaatagtatagaagcagaaagtggggttcttcattgggaattttttctgtcagcagatcaaccgacacaaaaaagctggaggctttgctcgttgagggagaacggatcgaaacgatttataaactgcgggttgaccaaatatgctttacgaataaacgagtgattttctttgataataaaatgttctccaaaaagaaagtgcgcgtatttcttccatataaaacaattgaaagcttcgccattcaagaagcggggatgtttgatcccgataccgggcttgtattaatgacaaggggaaaaactttcgaattggaatttgcaaaagaaacggacttgactgaggttcaagccatcttaacaaaatacttatgcagttaaatatcacataaaagccatccgaatgcatgcggatggcctttttattatataatgcttgtttttccggagttcgaatcaatgagatccggatcagcaatagaactgatggggatataaatcggcgccaaatcaccattttcttcaccgaatccgtagttgatcttattggataaaaaataatcgatttgctgatacgggccgatcgtaatggaagaaccgcggtcgactgcatttactttaaagcctcctacatttaccaaaaccggcgaaaacatcataatgggcctccttttccggcagggattttatcgcatgcagactcaaaggtagatggagaatcaatttgatcccggtcatccactttgccgttcgtgccgatgaagccgcttgcatctccgaagttctgtccgtatccctgattctttttatcagaattctgccattccgccagtaaattttgtccgacattcaccgctgaagcattttcaaaggaattaattttcaacatgaaaatattaatattgatatatggagttggttgaaccacaggcaaacctcctttaatacaggtgtatgccggctgttatgaccgtatgcttagacagggggcgataaaaatggatttcgataagatgaagcaatggatggaaatggcgcaaaacatgtccggcggcgacttttggaaaaacgtttttgatgatgaacaactgaaatcatttcaaaacggccattctcattttccctttcaacagggagatgggcaaatgagaagaaatgaggatgcttttcctcttatagatattgtggaaacccatgatgagctccaatttttactgtatctgcccggctaccggaaacaagatgttcagctgctgtcctacggagaatatatcgtcgtaaaaggcacgagaaaatccttttttaatgaacaggattttaaacagaagaccggaaaatacggcgattttgaaaaaaaactcgaccttccgcattccgctcagggaacaaagggaatgcaggcggtattcaaagacgggattttatatatatcgattgctaaacatctgggggatgcaagccagatcattatcgaaggctgatcttgtttgctgtgccatctatcagatctgaatcatcgatactcatgatagggatgacgacaacggtgcaatcaccgttttgttcaccgtacccttcatttcttttattggctactgtgtttctcaccataacggaagagccggtgttaaaagctgctccgccgctgattccgttcatttttatatactcaaaattgataacggatggaaaaaacatcatgattcgcctcctttttgtatatcatgtttatatattcgcaatgcgggacgcatagaactttccaagagtgacggggaaagaagtgattttctttgaaaaaaataatgaaagagattttcaaaaaagtgtgtgaagaagaattagaccggcttaagaaagtggaacaacagcttgatgagcttcaggataagtgtcattttgagccgcagacggttgaaggggaaaaaacatatgtccatattgagcacgtcaaagtggacaaggttgaatacaatattgattttgaaaagctgagtatagaagagctgagcggtatgctgaatatcggcgccacttaccatacaccggcgcacaggctcaaacaagcctgcgctgaagaatttcgggacgacccgcaaaatgatgctgcgaaagaaaaaagacagacaaagcagcagacacccaatgtcaccatcagggggagaaaccattgaccccgttgtttcagcctcctttttcgagggtatgtattaacagatgcagcgaagaacacagacgaaaaaggagatgatgaatatgtcattatcaaaagtacagcaggacagcctttatcataaattaatcgatttaaaggaaagtcttcagggagaatcaaaagaaaatcattcaatgagcgaagacacaggagaactgtcgaacggagtagataatcacttagctgatcacggaagcatttatttggacagggtcacgaatcaaacgctggacggtgtcgatcagaatcttttagatgaggtgaacgccgcgcttgaacgaatggataaaggaacatacgggatttgcgagaaaacgggaaaagaaattccttatgaaagacttgaagccgtgccgtacgccagaatgaccgtcgaagcgcagcgagaaacagaaggggatgtgaaaacagacgctccgtcatatgaaagggaatttcacgagcaggtgaaagacctctcaaataaagaaaccgttgatcaaaaaagctcacaaacttacgaaatcctggatcgcgagcaggattcacaataatagcagcaggtacattcatatgtacctgtttttttattccataaaaaatctcaaaatcgaaataaaatcattgactttatataaaaaagaaagtaacatactatttgtaagtaaatattaaaagattaccgggaggaatttagaatgtctcaagtattatttgtaaaatcaagtgaccgtacggctgaagaaggcgtatccgtaaaattatacgaagcgtttctggctgcttataaagaaaacaatccgaatgatgaagtgatcgaacttgatcttcataaagaaaaccttccttacctcggaagagatatgattaacggaacattcaaagcttcaaaaggaattgaaatgacagacgaagagaaaaaacaagcgtcaactgctgacatttacttaaatcaatttgtcaaagctgacaaagtcgtgtttgcattcccgctttggaacttcacagtgcctgctgtgcttcatacttatgttgattacctgtctcgtgcaggagttactttcacatacacgcctgaaggccctaaaggtctgatgggagataaaaaagtagcgctcttaaacgcacgcggcggcgtatattctgaaggaccgatggcatctcttgaaatgtcattaaacttcatgaaaaccgtcctcggtttctggggtgtccaagatcttcacactgttgtcgttgaaggccataatgctgcaccggataatgctcaagcgatcattgaaaaaggactgcaagaagcgaaagatctggctgcaaaattctaatttccattaactcttgcgcccctacagggtgtgagagttttttctattatagaagaaactggcggcagctttcgatctgatcttatattgatatattgatattttgtcgaaaaaacaatttttatgtagaataaagcatttttcacaaagaaaaaaggttttctgtaaaagaattaaccctcttgccaaaatacgactgatggtgtaggatataagagaagctacattgttcgtattgttaattaagttttaacctttaagctgtaatagggagttttatatcgaagccggaatgtcatgcctccattgcagaggacgacaggaacgcttctgcaaacacccactttgaggagtggtggtttaaaactttcttacttgcgtacggcatacgtagcgaaagccatttcccttgcggagatggctttttattttgaattgcccttgagcagcgtactttatcagtatgataaaatgaaagaatcaaagacaaagtgaggttttacaacatatgctggagaaagcccaatcccttctggcgcattattttggctacgacagtcttcgcgcgggccaaaagcaggcgatacaatcagttgcagaggaaagaaaaaacacggtctgcattatgccgacggggggcggaaaatcaatctgctatcagattcccgcactgctgtttgaaggaaccacaatcgttatttcccctcttatttccttaatgaaagatcaagtcgacgcgcttgaagaagcgggtatcgcggcagcttatattaacagcacccagacaagccgtgacattcatgagcgcctgaccggtttgaaacaaggggcttaccggctcttttacatcacaccggagcgtttgacttcttctgaattcattcacatcctgcagaatattacggttcctcttgtcgccattgacgaagctcactgtatatcgcaatggggacatgatttcaggccgagttaccggaatatcgaaatcctttttaatgaattaaaagaaccgcccgtcatcatcgcattaacggcgacggctacgcctgaggttcatgatgacatctgtaagcagcttcatattaagaaagaacaaactgtatataccggttttgccagagagaatttaacgtttaaagtagtaaagggcgaaaacaaagaccggtttatcgagcggtatctggaaaaaaataaacacgaagccggcattatatatacagcgacaagaaaagaaaccgaccgtttatatgagaaattaaaacgcagcggcatcaatgccggccgttatcacggcggattggcggatgatgacagaaaagaccagcaggagcggtttcttaacgatcagatacaagtgatggtagctacgtccgctttcggaatgggaatcgataagagcaacatcaggttcgttttacacgcgcagattccgaaagatatggagagctattaccaggaagccggacgggccgggcgcgacggtcttaacagcgagtgtgtgctcttattttcgccgcaggatattatggtgcagcgttttttaatagaccaatcggccgccggagaagaaaaacaaaagcaggatctcaaaaaactgagacagatggtggattactgccatacggaagattgcctgcagcggtttattctgaagtatttcggcgagaatgaggcggaagcttgcggagcatgcggcaattgcactgatacaaggaccgcccatgacgtcacaaaagaagcgcagatggtattgtcatgcatcatcagaatgaatgagcgcttcggaaaaacgatggtggcgcaggtgcttagcgggtctaaaaataaaaaagtgctggaaaacggcttcagcagcctgtccacttacggcattatgaagcatcaatccgcagcggaaatcagtgattttatcgaattccttatttcagatgaatatatcagaatggcggacggcacatttccgacgcttatggtcacccaaaaaggcagggacgttctgcttggaaaaagcgcagtctcgagaaaagaagccttacaggccgccgccgttaccgagaatgatgaattatttgagcttctccggcgtctccgcaaagagattgcagctgaacagggtgtgcctccatttgtcgtattctcagatcagacgttaaaagaaatgtcggcgaaacttccgaaaacggatcaggatcttctttccgtaaaaggggtcggggaacaaaaaagattgaaatacggagcagtttttttagaagaaatccgaaattatgtaagagaaacagagtgaaaaaaagtttttttagaaatttgcacattgtgtttttcattcgcgccggaaaaatcagaagcttgaaaacccttgctgtatcagggtttcagcaagacttaccaagcgagagaaatgtttcatgtaaaggaactgtaatctaattcaaatcgttttgttattgaactgacattttcatatgttacgatatcacctgttagccgccaataaaaagctaacaagggaggatttacttatgaagaagacgattatgtcctttgtcgcagttgcagcaatttcaacaactgcatttggagctcacgcttctgctaaagaaatcacggtgcaaaagggtgacacgctctgggggatctcgcaaaaaaacggagtgaacctaaaggacttaaaagaatggaatcagttatcttctgatttaatcattgaaggagagaaactgactatttcttcagtagaaacaaccacatctgggcagtacacagtgaagcagggcgacagcctctggaaaattgctcagaaattcggaacatcagtcggcaatctgaaaagcttgaataacttgcaatcagatataatttacgcaggcacaacgttaaatgtgaaaggtcaggctcaggctgcacagccggctcaagaagccagccagccgcaaactgaacaaaaaccagctgccgagacagaacagccgaaacaagaagctgtcaaaaacgagcagcctaaacaagaacctgttcaagaacaacaacctaaacaagaacctgttcaagaacaacaacctaaacaagaagcgaaggctgtcgaagcaaaacagcagcctgttcaatcaaatacaaaccaacaagagcctaaaaagcagctgacaatgactgcaactgcttactctgctaacgacggcggcatttccggtgtaacggcaaccggtgttgacttaaacaaaaaccctgatgcaaaagtcatcgcggtagaccctagtgtcattccgcttggctctaaggtttatgttgaaggttacggagtggcaacagcagcagatacaggcggcgcaattaaaggaaataaaattgacgtatttgttgcaaagaaaagtgacgctaacaactggggcgtcagaacagtaaatgttaaagtattagactagtttcatatagagatgaagaacacaaggcgaaatgctttgtgttctttttttcttcccttttttgactgtatataatcgttatatgcggaaaaagaaaaagcgtttctctaatataataaggaatggatgtgaaaacggaatctgaagggatgtatgaatctaatggagccggaatttatatgtttatggaatgccttcacagaatcaccggtgtttcatgcaggtatatgcaccgctttcgccattgtgctcgttatcggactgtctatgcctgctgtcaggctgtttcaggcgcttgacagagggagaggaaggccagccgttattgaaaaggtgagacgtactggcgtgatgaagaatggcaggcacgagcttgtgcttattttaaacgtaaaaaaccaagacggaacgcatgataaacgtgaactgacacatgccgtatataatgaagagatcagccgtttttatgaaggagcttccgtatgggtgacggcagcggctggcggacgaattatgatcgctccgcgcacgccgcggcataaggcgtcaaaataaaaagacggggcggttttcccggctttatgtattaatgccgatcgatccatatccgtccgccttctgagccggcttctatcctgcatgttcctccgatcgggaatgtcatcaaaggggaggtatggccgaaatcagcatttgcgataacaggcatggatgacagttcttcttttgtacggatgacggcacgcagagcctcctcagacacatttgaagcatgctggaaacgtccgatgacaattcccttcacggctgaaaaagcgggaaggtggatgagtgactgcaaatcccggtcaaacatatgaatgtccgacatataatcatcttctataaacagaatcacttgctccatctccggaaagtattcggtgccctgcagaagattcagcgtgcatagatttcctccgatcagtgttccttccgcatatccgggttgaataacgagcggtcccggattccgataaaaacgtctgtcctcctggttcaaataccatttatcatcactccactcggatgaaggctttacctcatacgggttgtcagaagcacagcaggccaagaaagagtcaatcgtatagtccagcccttttttcatggcaaatgaagaaaaatggggaccggaatatgtaataaggccggttttttgatatatggcatggccgagagcggtaatatctgaatagccgcaaaggattttcggatgccgcttgatgttttcataatcaagatagcggagcagctgatttgattggaacccgccgagtgtcgtcaaaatcgctttgatgtcagggtcagcgaaagcctcgtgcagatcccgtatacgcgattcaatggatgatgaatcaaattcatttatttctttcgcattctctgaaaaagagacacaaaagcccagctcctccaattttgtcttcgcggcatttatattttcatctgacataacggacatgcttgtggccggagacacaatacgaatgccgtcaccttttttcaatttttccggatacaaaaaaaccctccttaaatggtttaatctattacaccatattaacgagggtttatctatcattttttacaggtcgacccatttaatgccgcctgattgcgtatcattgtcaatccagacatcaaagtgatgcttttcataaaaatgaacgagtctgtcgacatgatcccaatcacgcttagcgatgtcgcctgtcactttcgggatattctgctctctggcgatatgttttaaaaatttcatgcagatcgagccgtagccatggttcggcgggcctttaatgtccccgatatgaatggcattgtcataataagaggcgatcagtgaaaaacagcctcttcccctgtaggctgattcacaatcagtcagcataatcttacatgtttggccatcatcaatcgaggaaacaatgatccaatcgtcattgttcgattgatcaataccaagcactcgcgcgtcttttgatacatctatcagattttcccgcattctgaaaatctgaaattcaagtttatgaagctctttttccagctctttctgatctctttcttctgcagtaaacaaaatcatactcctttcacagcgtaaaagtcttagttaaacacaagtatccattgtagtaaatgatgtcttggtttgtaaatgggttttgcaaaaacttttttagaaaagtctgccgtttatatgtggattgacgtttttaaggcggtgcggatagggaaaggaacagtgagcagcggaaaaaggaggaatctataatggcaattgactcactcatcggcaaattgaagtacgtaatgacggaatctcctgataaaatgctttccttatatgtaaatacggatatgagaaatccggatcagcaggggggagagtggaaaatcgccttgaaaaccggttttcggagattaaaagagtatctgtctgccagtgatccggaagaagaaaaatctctcgtccgcatcatggaacgtgtctatcaatatatcgatgagcttggtaaagagatgccgcgaagtctcgtattttttgcgtcgggagaaggcggtatttgggagacgattgaattgcaggtgcctgttgaaacacgattttattgggaagagacggctgtccttgatcaattagaacttcttcgtgaacaatttccgagcacggcttttattctcacccagcagaatgaagtgaagatcatagaaaccgtactcggaaaaattgaaggagtggagcattatcattacgacgtcatcaatgaatcgtggaaaccgcaggatgtaagcggaagcctctccgcgtcgatggacgaagacgctgccaaagcccacgtcgaagaaaaccaaaacaggctgtataaacgattggcttcaaaccttgatcaaaaggccgcttcacaccaatgggagcgtctcgtaatcgcaggggacaaagaaacagccgatattctcgatcagcacatgaataaaccgattgatcggatcattccaaaaaatctgttgaatgaaaacgaacataaggtgatagaagaactgttgaaggaagcatgatatgacgaaaggccgggtctcaaacacccggtctttttagggcttaagtttgtctaatttctgacgaagcgggcgaaaccgttgacatcaaagctgaattctcataccatttggatagtcagtaaaattgagagaggtcataagatgaatcagacagaaaacaaacctaaaagttataccggtatcgtgctgacattgaccgttctgatcaacgggttaattgcggtgctgttttttatgccgaaatcgggacaggtcagcattgccaatattcatattctgccgatgttaaatgccatttttaacagctttacttttatctttttgctggcagcgctctttatgattaagcaaaaaaatattcaagcgcataaacgctttattttggcggcgtttacgacgactctgctgtttttgatctgctatgtcgtataccactctgtggctgaaaatactttattcggcggccacggcatcattcgggggatttatttctttattttaattacgcacatctgtctttccgccgttatcgtgccgcttgcgctgtttacgctgatcagaggattcagcatgcaagtggagcgccacaaaaaaatcgcgagatggacgatgccgctctggctgtatgtcagtctgacgggtgtcattgtatacttaatgatctcaccgtattattaaaaaaagccgtgctctgcgcggcttttttctattgattgaaaaaggcgcctcatcagggcgccttttactcttcaagcgtttcaagtgttgttacatttaaggattgttcaacggtttttgtttttgcttttactttttctgcgtacgtgtaatcaccatagcagtagggataacggaaattgtctttgttccctccgcaagtgtaaagtttcggattctttttgacctgctgctcggagtattgttttgccagttcctcagtatgcgatcctccatgttcagccacaaaatcaatatagccggctcccatgttgtagctttgtataatcgtatccaagtctacgccttttttcttgcctgtttggtacatgagagtgaattgtttgattccctgtttgatactggtttgagggtttttaatctcatttcgctttaaacccagagattctgaagactgcatgggatcatttcctcttccttttgactcctgatatatcatgccgagtacaagcgatgtatatttggtgagtcctttttcatccagctcgtcttcaacaagcggtttgtaatctgtcagccgttcaaggacgatcggcttgacatcaaacggaagacttttgagccattcattatttgaaaataacagaatgaggaagaaggaaaccatgacaaaaacacatatcatcataagacccgcggcagcgaaacagccttttttctttttctccactgtgtttcaccctcaatttcaggagcattatgactttttcattatgacacagatgaatgcgcgaaaccaagcggaaacccgtatttgaaacataaatttaaaataacggttcttttgtcaggcgcaggatgtatctgcatcaattgacatttggtataattgggctacttgagaaaagaagggtgaggtatatgactgaatttcacgaatccggaaacaaaaatgaccccgctgtcgatttagatgaggaaactttatttttggttgcccagacttttaaggcgctgtctgatccgaccagaatcagaattctccatttgctgtcacagggtgagcacgcggtaaatgatatcgcagaaaagctgaatttgctgcagtctaccgtttctcatcagctgcgttttcttaaaaatctgcgcctcgtcaaatcacgcagagaaggaacatccatctattattctcctgaggatgaacatgtgttagatgtgcttcagcaaatgattcaccatacgcggcacgattaaaaaacatccctgcttttgagacagggatgtcagccgtactgactgttattggtttggtctctgctcgtttttaaaacataaaaagagaagccgctgtaataaactgcgatgaaataaaagatactgatggtcagcggatcggccccgaccgtttggctgtatgcctccggatgggtaaagtccgctgtgacccggtaaatttcaataacgcgataaacaaatctcgataggaataacgttaatagaataagttcaatccacaggtgagtgcgaaaatatatttttccgcggcgttcttcaaaagaaatgttccgtttagcaaacaggaccagaagccagccgcaaaaagtgccgaatataagatggccgtataaagccgggtgtgtgatgctgaaaaacgccagagctgcggccagcaatgaaaacaaaatcattcttgtataaagccagcggggtttcaaaggctgaaagccgacggaccgtttcacctttttatacagaaaaaaggcaatcattaagacagggcagatgctttgaagtgtgatatgcatggtgtggaactccccctccgttgagtagtgtatgcttatccggctggttttagtagtgtgatttattcgcaggctgaaagcatcttttatcacattatgcacgtttctttttttggcataagagaatcgcccgcgcctttttcaggatttaaacataaaactcttgaaaaactaacggtattaggtataataaaactaatgatattagttttaggaggatgttcatgagaatcttacaatacggaaccgtttggcagctgactttttttccagcgcttttcccggtgaattgttatttggttgaagaagaagaaggagtaaccctgattgacgccggactgcctaacagtcataaaggaatcaaacaagcattgcggcagcttgggaagccgctgaatgacatattactcacccacgcgcacggggatcacatcggttcgcttgactcattagctgcggaatttccggatgcttccgtctgtatttctgagcgggattctttcttgctgaaaggtgacacttcattatttgagcatgaagcacaaacaccgataaaggggggagtgccgaaaaatgttcagaccgaacctgatcgcctgctgaaaggcggcgagcggatcggatctttacttgtcattcccgctcccggtcatacgccgggaagcctcgcttttaaagatatgagaaatgatatgctgatcgtcggagatgcctttcaagtacggggcggccttgctgtttctgggaagctgaaatggaaatttccgtttccggcttttgctacgtggaataaagaagaagctgtaaaaacagcaagaacacttatcgctcatcaaccaagcagtctggccgccggacatggaaatgttctctgcaatcccgttgaaatgatggctgaggctgctgaggaagccgaacgaagcctgccgggaggccgatcataatgtcaccgagagtcggaatgagccttgacatgatattgagagccgcagcaggcatcgctgacgaaaaagggctgaacgaagtgacgcttgcggctgttgcaaagtccttaaacgtaaaaccgccttccctttacaattttgtcaatggccttcaaggaattaaaacagagctggctgtctccggtttaactatgttatatgaaaaaatggcggcctctgcagaaggactgacgggcgaaacggctttgcttgctcttgccgatgcctatatcaatttcgccgaagccaatcccggattatatgacgcaacatttcaaaagataaaagacgggcggattgagaatctgtcaagcctgcttgtagagcttgttgtcaggcagctgactgctaacggttatgcacagtctgacactgcgattcatgctgcgagaggactgaggagccttcttcacggatttgccgtgttgagaaaacagagtgcatttgaattaaccgaatcaattaaggaaagccggaagtttgcagttgttgcttttctaagaggtttgcaggagagggaacaataatattattatgtaaactaaataaaaagacgcatcatgtaaaaaggagggacaaatggattcattacaacatatcatttgtgagcggcgcacctattcacatatatttgattctcatgcacacacatactgccaaatgctctttccgctcgaaggacagctggacctggagacagaaagacgtaaaatcagattaaaacctgatcaaatgctgtatattccgcccgggcatgaacatcggttccgttctttggagcgaaatgaatgtctcgttctcgacataccggcatattttttcaaaggttcattagaccccggcgttctgaataagcttgatcctttttggacatcgattcggtttctgctgacagaagagacaaagcagcagtcggctcattcattgagtctgcttgcagaatatattgctgaaaagatacaagtaaaccgtacgaatgattcaattgcgtatatccgccgaaatctatcaaagacttttacaattaaagagcttgccgcaatggaacattaccacccggcgtattattccgactggtttaaaaagcagacggggaaaagcccgcaagcttatattgctgagctccgtatgaagaaagcggaacaaatgcttattgaaacaaaatgccggctgacagacatcagtcaggaggtcggctttcaaaatttgtcttcctttaccagatggtttgtcagacataagggaataacgccgcgcgtcttccgaaacacctttcaatctgataaataatcctgaaaatcggttaaataaactgcttctttttttggtatcatgattgtaaaaaaggagtttttgatatggcagtcatcgaagattttatcaagcttgatcttagaataggaacggtcgtaaaagcggaagtattcccggaagcaaaggtgccggccattaagatgacaatagatttcggcgaaaagatcggcatgaaacaatcaagcgcccagattacaaaacggtacgaaccgggtgatctgatgggcagacaggttacagctattgtcaactttccgccgcggcggatcgccggatttaagtcagaagttctcgttctcggcggcatcccggaaaaaggagacgttgtcctgcttacgccagagcagacagtaccgaacggaacgaaaatcggataataaaaaaagacgtttgcagaagcaaacgtcttttgcgtattgaggcgatacaccacacgccacattcgtgtgtgccgcaagggcatgtgcatcggcttacacaattcagctcatcgctatatcaatatagcatgccgggtgtggaaatgcaagagattttttaatatatgttatatctggctttgttttaccgatcccagattccttcgtgtaaggtttaatttgaaattttatgatcttgaataaagcagttcgacaaatgcaagagattcatctaatcttatatcctatggtaaaatttagacagaaagaagcagaaaggagccgtaaatgaaagtatttgaagcagcctcgttcatttcagccgcagaaaagcgggcaaaacaatacgatcagattagagaacaatttatcaatctcagaaaagcatttcagggaatggctgatttagatgacagtgagttttcaggcaaaggcgccgacaacattaaagcattctttcaagatcacgccggtgtcacagacagctggcttgatctgatcgatatgaagattgcgtttcttaacagtatttctggaaaagtatctgatgccggattggccgattcgtttgtggaagagtcatttttagaacacgagctgattcatgcgaagaataaatcacaagccatcatgcaggagcagcgcaatgaactcaaggacatcataaatgaaatcagcgatatcattcatcttgatgttttctctacagaagatgtcgatcaaaatctggaatcagcagacaaaaaacgggacgataccgtaaataggctcggcaagcttgatcacgatctaacaaaagaatacgccgaaacagaagcgaacgaacagttcatccaggccgactttcagcagctccaaaatgccacgggcaaaggaaaaaacgccactccgcttcactataacgccaaggcgtacagggaaagtgacatacataagaaaaaaggcgagattgcaagacattcagacacatatttaacgtttaagaaggaagaagcaaaagagcgggaaatcaaggatctgaagaaaaagctcgctgacggtgtgaccgatccggatgaatacttggaaattgcgaagaagatcggctatgaaaaccttgaaccttcccagcagcaatatgtcattcagcttgaacaagcaaaacagcttgaagaagccggagaagtgacttgggatattttaaaaggagccggcgttggtttatatgatgtcgggaaagacacggttagcgggttatgggacttcataaccgatccgggagaaaccttgtcagcactggggaatgcagtacttcatccagtaaaaacatatgatgctgtttcagcagcaatcgaggaatcgtatcaaaaagatatggtgaacggagatgcttactccagatcaagatgggtgacatatgcaattggttcagcagctgtggctgtcgtcggaacgaaaggcgcaggagccgttaacaaagctgatgcggcggggaaagtcataaacagggcaggacaggcagggaagaaaattaaagacgttaaacttccagaactgcttccttataactctaaatatgatcttgctctgtcgggtgacgtaccatacaatgtggttgacagccaaaaccttaaaaatgaacttttgaccaatgcaaagaaaatcccggatggaacgagaaagccgtttactggtcaagaaataaaccttccttggttaaataaagaaaagtatggtgcctttgaggttaagggcaaggtaaaagcaaagggaaaagttaaagacataagccgcagagtgtatactatgaaagatattgatatgaaccaaaaaaatcgtaaaggccttacgaatcttcaattaatgaaaagtggaaatgcaccttttgcgaaagatgggacacaaataaatctacaccatttaattcaagaggaacctggtccaatgcttgaaattccaaatagcttacatactaaatatagcggcattatccataggcttaaatctgatggtgaaagctttagaaacgatccggttttaaaagcccagtatgataatttccgagacaggtattggaaatggagagcaaaacaatatgaaaaataaaaaaggaatgagagatatcaatggacttatatgaaaaaactatagagtttataactgaaaataaagcagacagttattttactagaggaataagtgaaaaagagattattaatatagagaaggagctccaactacaacttcctgatagttataaatggtttctgagaaactttggctctggcggcttatatggaattgatattttagggtatgactttggcggggcttcggtagttgaaaccacagaggaatatcgtaattattatcatttatctgatggacttgtgatattagaagatattgatttttttgcttatgccttagatactaataaaatgaacagtaataatgaatgccctgtttttatttgggatagagtacttggataccaagacaagctagccgacagctttattgaatttttctacagaaggttgcttgaaaaaaaagaaaactgggaagaagatgaagactgggacgattaataaaagaaagctctctattagagagcctttttcagattttcaatttttaacaggctttataatgagcaaacaggcattactcaaaatactcgccgcgcctatccaaagcagccattgtgttgcggtcagccatgaggcagttaggataaagagtccaatggcaattgatatataattgccggctcggtccagtttatgtttgcaatgaattttatatttggcatgagaaataaattgatcaattttatctttcagctcatagcatttttccttcatcttatcctctgtttcttttacttttcgataaagcatattattcatcgtctgcactcccatatcgccgttttgaaaattcagccatgattttttcttcatagtcatctgagatgaattgtgcctgatcttcaactttcaaatgtgctttttcttcaaaaccatcctgttcttcaccatcaaaacgataaagtttttgcaatagcctccagaatgtttcaatttcatcagttgtgaagtcatgaaacatatccgctaaaaaataggtggatttttctgaacaggaaattaacgctttttttccttcagcggtaatctcaatattgattgcacgtttatccagtttgcttggcacagtgtgaacatatccttttttcgcgaggcttgaaattaatttgttagcggtttgttttgttgtgcccagctttttagcgatattcataagtgtggtatcttccgtcggtaaatgggcaatagcaataagagtcatgtgctgtcgggaagtcaacatttctaagtattcgtccccccgagcctgcactttattgacaaccgaaaataatgatgcgtaactttgttgcataacatgcagttccttcattagtaatttaatatccataagttatctcccatctaagatgtcaccatgttgacagttacaatatacatcacaaaaggaaattagtcaacatggcgactaatagtggcaggtgcggctgttttcaaaaatgtcacaggcagtcggagtgtttacaaaaggggaaataagtataataaatgcgaaaagggcattaatccaaagtgagaaggtgtttgacatgcagaaagtgaactggtcagaacagtatgaatggttcaataaacaagatgaaaaagacgggcgtttaatggcgctccttcgtcatgagcttacatatgaggaagtcatacggttatatatgaaagggttttatttgaaatcaaaagaaggggatgtttcgttaagtaagaacgatatccatcgtatgtttggggttgaagagagaaagggcggcacatcttgatgaacgggaagagaaaaacccttcccgcttttcatggaagctgttattctttttccagcatggaagtcagccattctcttaacgcagttttctgtacataccgctttccgtttctcgtgatatgcggaatgtcggaggtgtcgggcacgatttgtttcgcttcttccttggtaactcctaaataataaccgatatagaagtgcagatctttttctttaatgagaatgtggtcagtgtgttcatgaggatcaggtgatttaaaatttttcaatccgtctccgatgaaatatccggctaaagcgattccgatgccggtaatgatatccatacagcaaacctccaataaacgttatcactttttatacggtgaagccggccgaaaggattcagccttcatcaaaaccgctcggcgtttattgcggacggttttaattgctgagcttttccacctgcacctttccggagaagaaaacagcgcctcctcccatatccgccagccgatcgggcgtgagcgaattgacgagctgttttttatcatccatatcggcccaaagaccttggctgactgcaacgccgggaagcacctgttcgccgaccgaagctgttaattcacactcgccgcggtgattccaaactctaacggtttccccgtcttctatgttccggcgtacagcatcctctgtatgaataaaaagctttggcgctttttctaattttacgtgtttttcattattcgaaaatgttgaatttaaaaaattatgattcggtcccgggacaaataaaagcggaaaatcaccatcgctctcaagagggatatgtgtcggcagcgcgggataaccgtcttgtttcatcttttccgaatataattcaatttttccgctcggtgtcttgagctgtcccggaaaaagcggttttttccgtttggctttcatgaaggaatggcgtgagagcgcttcgtaatcaatatcctcgatatacggattgtcgggaaagtccagcgcctgtctgatcaattcttcatcggtatcctgaagctcctgctcggtaaatcccattgctccggcaagcaaacggaacacttccgtattcgatttgctgtccccgcagggttcgatcaccggtttttgcagctgaataaaatgatgccagtaagacgtgtaaaaatccgtgttttccaaagcggatgcagcagggagcacgatatccgcgtatttggcggtttccgttaaaaacagatcgtgaacgactgtaaataaatcctcccgcagcaggccttttctgactttattcgcttccggcgcaaccactgcgggattcgtaccgtaaataaacagggagcgcacgggcggttttgtttctaaaagaacgcttccgagcctgttcatattaaatgatcgtggcttcctgccgtaaagcagatcaggccgctggagcgcttgtctgttatagtttaataccgcgctgttgtgcttgattgcgcctcctccggtgttgagccactgtcctgtaacagccggaaggcaggcaacggtgcggacgatcattccgccattgtcatggtgctgaatgccgtttccgatcctgataagggaaggggaggtttccccgtacattctcgcaaggcgtctgatatcgtcggctttaacgcctgtaatagcagaaaccgtttccggatcatagtgtttaacatgcgcttttaattcgtcactgccttcggtgtattctgtgagaaatgcttcatcgtgaaggttttcgtcgaataagacatgcatgataccgagggcgagtgcggcatctgtgccggggcgaatgggaataaaccaatcggcaagccggccggtttggttcttatgtacatcgataacgacaattttagccccttttttccgggctttttgagcaatcatgacttggtgcatattcgtgctgacggcattgatcccccaaaaaataaagagctttgcatgtatggtctcctccggatcagtacccgctccttctcccattgtatagttatagccttcagaaccggctttgctgcagatcgtccgttcgagatgactcgctccgagacgatggaaaaaacggcggtccattccctctgccgccagttttcccatattgccgtaaaagctgtacggaagaatgctttccgctccttcttcggcaataagctctttccagcgcgcactgatcgtattgatcgcttcctcccaggaaataggcgcaaacgcggcttcaccttttttaccgatccgttttaacggaacggttacgcgcttttcatcataaatgcgctcagccatgtgtctgactttgttgcaaatattccctgatgtgaccgggtgatcggggtctccctgaatgttaacgatttttccgtctttttttgtcacaagcaagccgcattgatcgggacagtctagtgagcataccgacttaaagaccccgttcggctgtgttgcagcagaattcatagcccatttctcctctttgtttatattgtaagcattataacatttcaaaatcgaacgtcaattcagaaaaaaagtgttgacatcacggaaagacttttctatgatgagtttattcttttaaacagcctgacaatttcatcattttattttctatccagagaggtggagggactggccctacgaaacctcggcaacatttattgtgccaattccagcaagcgtatgcttgaaagataggaaagaatgatctatacatatttgtgcgcttcaagcgcataaagacggtatatgaatctctttccttctttggggaaagagatttttttatgacaaaatttatgtgaaaaggatgttttgcaccatgacggttttaattaccgcaccatatcacgacgaggggctgaaggagctgactgagctgttcggccggactgtgcaccggccgtggaagaagcacggccgggcctatcgggaagatgaattgatccgaatgattcaagagacaaacgcgtcggggcttatcactgaacttgatgaggtgtctgagcgtgttattgacatattgcctgattccgcttttatcggtgtctgcagaggaatgccgtctaacgtgaatattgcggcggcgactaaaagaaaaatccccgttttctttacaccggcccgcaatgcccaggccgttgctgaaatgtttatcggaaatgtgatttcatttttgcgtcatacgtattcttcccatcagtggctgaaggacgggaagtggaatggtgattatttgcaggcttatgtcaaattcagaggaaatgagctgacggggaaaacagtcggccttatcggtttcggagctgtcggacagagaatcgcccggttattggccgcttttgactgcaaggtgctttactatgacccatttgtccgtcatgaaaaccgggagtatgaaaaaacgacgattgaacgggtattttctgaaagtgatattgtttccgttcacttgccgcgcacagaagaaaccatcggccttatcggcgcccggcactttcaattgatgaaacaggaagctgtttttgtcaatacgtcaagagcggcggttacagacagggaagagctgctgcgggtgctgaaagaacggcggattaagggagcgatccttgacgtgttttatcacgaaccgccagaatcttctgattatgaattgatctctttgcctaatgtattagcgactccccatttagcgggcgcaacatttgaagtggaagatcatcatgtgaagattttaaatgaagcgcttttcaaatggaaacaagatcaaacctgctcaatacgtgaactttataacaaaagagaacttgaaacggaaggaggaggctgtaatggctgaacaaaaaggctaccttgtatttgacatcgggacggggaatgcgcgagtcgcggtcgtgactgccggcggcgaagtgaccgcgcttgaaagggaagacattgaatatgtgacggatccgctttatccggacggacgatatttctcaccggaaagattatggacgcaaatcagcgctatggcaaggaaggttattgccaaaagcccacatattacattaatcggaatcacctccacaagccagaggcagggaattgttctgatcaataaaggtaaaaaggcatttctcggtctgcccaacattgataacagaggccgtgaatgggaagacgggattgagacaaaagaagaagtgcatcagcaaaccggacgtcttccgagcgctttattttccgccatgaaacttgtcggattaaaagctagacagccgtctttatggaaagaagtgaagtacatcacaagcatcagtgactgggtgacatttgagctgagcggtattttaagctatgaaccgtcacaggctgctgaaacactgctgtttgacgtaaggaaaaaggcatggtcagagaaattatgcaacatcttcggtgtgccttctgccattcttccttcactcgtccgatctgggacggttgtcggaatgttaacgtttaagaaagcggcggttctcggtctatctgaaagagtgcctgtgattgcaggcgggggagacacacagcttgccatcaaaagtgcagatgcaaagccgggagatatcgtcatcgtatccggcacgacgacgccgattacaaagataacagcggagaccggaaccgaaagtttaacgaatgcatggctgaattgccatacagaagaaggtcaatggcttcttgaaacgaatccgggtgtaacaggactcaattatcaaaaattaaaatccattttttatccgaatgaatcctacggcgttatggaacgggaaatcgcaagtctgccgaaacatgatcatgcttgtatttctgcgttaggctcctatttatcgcctgagaaaaacgcactggcaaaaggcggatttatttttgacgctccgctgtcccaaaacttaagcagagcccattttgtcaaagccgcactgctggaaatcgctttttcaatcaaatggaactatgaggcgttaatagaggtggcttccttttcacaagatgatgtgaaggtgtgcggcggcggtttccaaagtgatgctttgacgcagtttcttgctaaccttctccaaaagaaaatctataagagagaggggttcagccaggcatccgcaatgggagcggcgatgatttgcaacgaagctctcggtgtgaaagcagagctttcgagccgcacaaaggtaattgagccggaagcggatcagacggatctcttcctatatgaagaatggaaacatacgcaaaaattatttactcattttcagccggcggtgaaagcctgacttggggatgagatgacaacatgaaagattgctgaggaggaacaaaaatgcttaataaaataggaattccaaaacagctcgcatggggatttttgggagtcgtgctgtttatgatgggggacggccttgaacaaggctggctcagcccgtttttagttgaaaacggcttgacggtacagcaatcagcatccctgtttacagtttacggtatttctctcgctgtggcgtcttggttttcaggggtctgcctcgaagccttcggcgcaaagcggacgatgtttatggggctgttgttttacgttatcggaacagccgcatttatcgcatacggatttgaaaatcttaatttgccggtgatgtatgtcacgtattttattaaagggctgggttatccgctgtttgcctattcttttttgacatgggtgatttaccggtcgccgaaaaacaggctcagtacggcggtcggctggttctggattgcatattgctgcgggatgtttgtattcggtgcttggtattcaagctgggccatcaaatccttcggctatttgaatacactgtggagttcaattttctgggtctgcctcggcgcgttttttgctttgattttaaatagggaccgctttgaaaagaaaaaggcagataagcgggaaaaggcgcaggaattaatgaagggaatcaccatccttgctgaaaatccgcgcgtgctctctggggggatcattcggatcattaacagcatcggtacatacggatttccggtatttcttccgatgcatatggcgcagcacggcatttctacaaatgtatggcttcaaatttggggaacgatctttctcggaaatatcgtctttaacttgatcttcggcgcagtcggcgatgccttcggctggaaaaagactgtcatgtggttcgggggagtgggctgcggcatttttactcttttattatattatgctcctgttgtatcacatgggaacttgcttttcgtcagcattgtcggttttatatggggagggctcctcgccgggttcgttccgatcggggctatcgtgccgacggcggccggcagcgataaaggtgctgccatgtctgtgttaaatctggctgcgggcctgtcggcatttgtcggccccgcgcttgcctgggcgttcatcggacttgtcggcgcacaaggcgttgtatggattttcgcagcgctctatttcgtaagtgcaatcttgacaaatcaaatcaaaatacctgaagagaaaacggcaaaacacaataaagcattgcctgaatacgcttcttaacagcagcgccccgaaaattcggggcgtttttttacagctgctgaagaaacccggcaaagcgctgaatttgttcacgtaacgattgtttgttttcgtgaaattgtttgaaacgatgtccgtttgctccggacggatgcgggaagccttccagaatgaccgcatgacccattctgccgttcttcttcagcatgcggcaggctgattctgctgctttgccgagagggataagcagaatgtcctttttcatcatttctatttcatccggaaaacatgtcagcgcgtaacggctgagaagagctgacctgctgattgccggccgatgtcccgtatagtttttctgtttataaaaaacagggtgtttgataacggacgttgtatgaagcagctcccgttttgaatcaaataaccgggatgaatcctcaacgtgaagcgcggccggcagaccgcattcattaagcatttcgatgatgttctgcctcattgaaccggaaagtccggccgctttttttgtttcataggctatcgtttcaaaagtttcgccatcttttaaaagctgtgccgcttttttgtaagccagctgcatttgaaaaaaaccgggtgtgattccggaaatggcaacgactgcataagggttaatatattcattatgaggcgaataatacaaatccagatctccgtccttagctaaatggaaagccggagtcagcaaatccgattttgtaaaccctcccgaagaagatagtgctttaagctgctgcaaaaaatgcgcaagccgctcacgatcgcaaatcatgttatgcctccttggatccgcgccagtttctcttagtgtcatcaaaaacgtcggatgacatgcaggctcataaaccgcttttaccggcgttccagagcattttcagcacgtgaggcgttcctttaacttcggctgccgtcgtttgcacggctgtttttttagtaagaaagtcttcctgcagttctttctgcttttgtgataacaaacgggtttctgttttgatttcatcaacggacgtctgcatggacgctgtcacggcgttaatcttctttatatcaggcgctgtgtttcttttaaaatggacggcggatacggctgcataaattaatgcggcagccgcaacggcagcactgatatacaaaatgatgatcatctgcttttcactcctttttttcagttgataccctttacggatcgtgttgaatcattttatttgctaattgttttttttctgcttataatgtgaaatcgtacataaggacattcagaaagggtgaaagacgtggaaagtttacaaaacaaaacggctcttatcacgggtgcgggcagaggaatcggccgcgccgccgctatcgctttagccaaagaaggagtcaatatcggtttaatcggccgcacagaagcaaatgtcgaaaaggttgcggaagaagtgaaagcccttggtgtaaaggcatcattcgctgctgccgatgtaaaaaaccaaaaagaggtagagcaagccgtctcctctattaaagaagaactcggtgagattgacatcttgattaacaatgctggaatcagcaaattcggcggatttttggatcttacgcctgaagagtgggaagacatcattcaagtgaatgtaatgggtgtataccacgtgacacgcgccgttctacctgaaatgattgagagaaaatcaggagatatcattaatatttcttctacggcgggccaaagaggcgccgcggcgacaagtgcgtacagcgcttctaaatttgccgttctcggtctgactgaatctctcatgcaggaagtcagaaaacacaatatccgtgtcagcgcaatgactccgagcacggttgccagcgacatgtctattgaattaaatctgacagacggcaatccggaaaaagtcatgcagcctgaggatcttgcagaatatatggttgctcaattgaaattacatccgcgcattttcatcaaaactgccggtttgtggtcaactaatccttaaacaaaaggggacctgtcttcgtgacgggtctttttttgtttccgcaacccgaataaatgggcataaagatccgtttttgcagaaaaaagagtgaaaaagaaaccgatatcagctataattaaactaaataaactatgtaccaaatgttcactaaaattatttttcctcgcctccaaaaaacaaatcaatacaaaccaaactgtccgaacaataaaagggaaaacgggatataaagagaatatttagtacatggaataatttgttagaaggaagggtgtgcacatattgaaagaagaaaaaagaagttcaaccggttttttagtgaaacaaagagcttttttaaagctttacatgattacaatgacagagcaggaacggctttacggactgaagcttctcgaggtgctgcgttcggaatttaaacccatcggttttaagccgaatcataccgaggtgtaccgttcacttcacgaactattggatgacgggattttaaagcaagtaaaagtgaaaaaagagggagccaaactccaggaagtcgttctctatcaatttaaagactatgaagctgcgaagctttacaaaaaacagctgaagacagagcttgaccgctgcaaaaagctgatagaaaaagccatttcagataatttttaaatccggccggaacgcccccggcctcccgggctcaaaaggtttgttctgtgattcattatacataatagcaggctcggaacaatacatatcaataataccttcaaacttgacatcaactcctgaagtggtaacataaaaaacgtgtgaaaaatacgaacaaaatacgaacaagggagatgttaccgatcttagatcaaaagaaagttgcttttatcggagcaggatcaatggctgaaggaatgatatcaggcatggtccgcgcaaaaaaaattcccaaccaaaacatctgcgtgacaaaccgccgcaatacagagcgactcgctgaattggaacatcaatacggtattcagggcattgcttttgacagcatgaaaaccgaagatattgatgtctttattttagccatgaagccgaaggatgctgaaatcgctctggctgcgctgaaacggcgtattcaacctcatcaaatcatcctgtctgttctggcaggcataacaacctcatttatacaacagtcattacatgataatcagccggttgtaagagtgatgccgaacacatccagcatgatcggcgaatcggcaacagctgcggctttcggagaccatgtctcttacggttcagcaaaaaccgcggtatcccttttggaatgcctcggggaagtgtacgtgatcaaggaagatcagatggacattttcaccggcatcgcaggcagcggaccggcgtacttttattatttaatggagtttattgaaaaagcaggtgaagaagccggcttagacaaacggctgtcccgcaaaatcggcgcgcaaacgttattgggcgccgctaaaatgctgatggaaacgggtgaaaaaccggatgtgcttcgggaaaacatcacctctccaaacggcacgacggaagccggcctcgatgcgctcaggtcagaaggcggcggagaagccattgccaaagccatcaaacacgcgaccgaacgttctattgagatcagcaaaacaattgaaaaaacggcagcactataatcgttaaaaaacaggagtgatacagtgacgtctcggacgaagatcaaaagagtcgcggtgaaaatcggcagcagctcactgacgagcctgcacggggaaatcagcagaagaaagctggaagcattggtggatcaaatcgcacagctgaaagacagcggctatgaagtgattttagtatcttccggcgcagtggcggcaggttatcggaagctcggatttattcagaaaccggaaagcctccctgaaaaacaggcttctgcttccatcgggcagggattattaatggaggcttattcaaagctgtttttagcgcacggttatgtcgcatcacaaattttaattacaagaagcgacttttccgatgaatgccgctaccataatgtgcgcaatacgatgaacgtccttttggaacggggcattattccgattattaatgaaaatgacacggtcacagtcaaccggctgaaattcggagataacgatacactcgcagcgaaggtggcaggtttaattgatgccgacatgcttgtgattttatcagacattgacggtttatatgatgataatccgcgcagcaacccgaaagcgaaaagaatcagtcatgtaagtgacatcactccggaaatagaagcaagcgcgggagatgccgggagtgaaatgggaaccggcggaatgcgttcgaaactggatgcttttaaaattgtgatggcctccggtattaaaggctttctcgggcaggctaacattccggacattctgcttcaagcggtagatgaggcggctgaaggaacttattttgaagcggaaggaaccctgccgttaaaccacaaagaacaatggcttgcatttaattccggccccgaaggcgaaattgtgatggaaaaagaaagcagccgcgatgtcgcgaacggaaatatggagctgtcaccgcaggacatcgagcagattaagggcagattcagcagcggagcggttgtcaggctgcttgatcagcagggagaagagctcggactcggcatcgtcaactattcctcagcccagctgaagacatttaaagaaacgccgcccaaacagaccgatcaatcagtcattgatccggaagcgtttgtctgccacgttgaactatccattccgatcggctgagaaagatctataaaaatatgaaaaagcccgaggcttcgttttgaagctcgggtttgttttttattgatattgttcaagtttggagaaaaattgaatgacaaaatgatagaaatcatttgcagacggagccagttcccttccttttggtttaataatgcctacggtgcgcttcacttgaggaaattcaatcggaattttgaccgtgaaccgaggggtggtttctccaaaggtgctttcaggtaataaagtaactcccatccccgcggagactaatcctttaatggcatctaaatcctcgccttccgtcgatacaagcggcgcaaagccggcctgtctgcaagcgtcaatcgccatgttacggagaataaacccttcaggaaataaaacaaattggtcgccgcgcagatcaattaaatgaatatttttctgtttggcaagcggatggtgcagcggaacaagcgcgtaaatcttttccgtgaataagatattgcctgttatgtcggggaattccgtcggaacggggccgagcagcgcagcatctatatccctgtttcttacggcttcaattaaaaacttataagacccctggcggagcaaaaactcaacgttcgggtattcctctttaaacgccgaaatcaccgtcggcaaaagctggcttgcaaggctcgtcggaaatcctattttgacggttccgcgattcggatcaagatattcatcaatttgttctttcgcgtaatcaattgctttcatcgccgttttaatatgttctaaaaattgtttgccgatcggcgttaatttaatatttctgccttcccgttcaaataaagtgacttgcagctcttcttcaagatttgcaatctgcctgctgatggcggattgtgcgacatgcagatgatcagccgcttctgacacatgttcccgttctgctacctccataaaataccgaagctggcgtaattccattgcgttcacacctatctatctcattttgagatgtatttgatctaaattatatattgtttatattgttttgaaaacttacaattaatttaaagttgtcagattttatgaccgataattaacggaaactgatcgggggagaggaattatgacttacaatcaaatgccgaaagcacaaggtctctaccgtccggaatttgagcacgatgcatgcggaatcggcttgtatgcccatttaaaagggaaaccttcacatgacattgtcaaaaaaggactgaagatgctttgccagctggatcacagaggaggacagggcagtgatccgaatacgggtgacggcgccggcctgatggttcagatccctgatgctttttttaagaaagagtgcggagaaatgagactgccggaaaaaggccgttacggggtaggaatggtctttttctcgcaaaatgaagaggaaagaaaaaagattgaaaaacaggtgaatgcattcattgagcgggaaggacagatcgttctcggctggagaaccgtccctgtaaatgtcggaaaaatcggaacagtggcacaaagcacttgcccgtatgtgcgtcaagtattcatcggcgccgcaaacgatttgaaagacagccttgcttttgaacgcaaactgtatgtcatccggaagcaggcggaaaattggggcgttcaagaacagcttgatttttacttcgcaagcctgtcaagccagactattgtttataaaggtttgttaacgcctgagcaggttgacgcattttatttggatttgcaggatgaaaccttcgtatctgcattctcacttgtgcattcaaggttcagcacaaatacctttccaacctgggaacgtgctcatccgaaccgctatctgattcataacggagaaatcaatacgctccggggcaacatcaattggatgagagcgagggagcagcagttcgtttcagaaagcttcggagacgatcttcacaaagtgctgccgattttaaatgctgagggcagtgactcatccattcttgataatgcgtttgaatttttcgtgatggcagggcggaaaccggcacatacggcaatgatgctgattccggaaccatggacggaaaacactcacatgtctaaagcgaaacgggctttttatgaatatcacagctctttaatggagccgtgggacgggccgaccgccatttcgtttacggacggaaaacagatcggcgccatccttgaccgtaacggcctgcgtccggcacgttactatgtgacaaaagatgaccatattattttctcatctgaggtcggcgttattgaagtagagcaggagaacattcttcataaaaaacgtctggagcccggaaaaatgctgctcattgacttagaagaaggccggattatttcagatgaagaagtgaaaacagaaattgccaatgaattcccttatcaaaaatggcttgaagaagaattggttcaagtgaatcctgacccggaaatccgggaagaggaacaattcgatgatcttctcgtccgtcaaaaagcgtttggctatacgtatgaagatattcagaaatatttaatccctgttattaaagaaggcaaggacccgctcggctctatgggaaatgattcgccgctcgccgttttatccgaccgcgcccaatcactgtttcattactttaaacagctgtttgcgcaagtcacaaacccgccgattgacgcgatccgcgagcagctggtaacttctacggtgacctggctcggagctgaaggcgatctgctgcatccgagtgaaagaaatgcacgccgcataaaattgtatactcctgtattatcaaacgaacagttttatgcgctgaaaacacttgtgcatcctgacattaagagccagaacatccgtacgctgttttccgatgacctagaaaaaggcctgaaggatttgtttcagcaggcggaaaaagcgatcaaggaaggcgtatctctgttaattttatctgacagggcaatgagtaaagagttgacgccgattccgccgcttttggccgtcagtgcgctgcatcagcatttgatccgccaaggactgcgaacaaaagcaagcattatcgttgaatccggggaagcgcgtgaagttcatcactttgcggctctcatcgggtatggtgccgatgctgtcaatccgtatttgacttacgctacgtataagcaggaaatcgatgaaggccggcttgatattccgtatgaagaagctgtcagcaaatacggaaagagcgtaacagaaggcgtcgtgaaagtgatgtcaaaaatggggatttcaactgtgcaaagttacaggggcgcccaaatttttgaagcggtcggcatcggtgaagacgttattgccaaatactttaccggtactgcatctcagcttggcggaatcgatatcgaaacgattgcgcaagaagcgaaacagcgccatcaagcggcgtacaaggatgattacagccaaacccttgatccgggaagtgaattccaatggcggaacgggggagagcaccacgctttcaacccgaaaaccatccatacgctgcaatgggcctgccgcaaaaatgattacagcctgtttaagcagtattctcatgcagcggatgaagaacgaatcggatttttacgcaatctgttcgccttcaaagaagaccgcaagcctttaaaattagaggaagttgaatcagctgcgtccatcgtgaaacgttttaaaacaggagcgatgtcattcggttcattaagcaaggaagcccatgaggctttagcgatagcgatgaacaggcttggcggaaaaagcaacagcggagaaggcggcgaggacccgaaacgtttcgttccggatgaaaatggcgacgacagaagaagtgcgattaaacagattgcttccggccgtttcggcgtaaagagccattatctcgtcaatgcggatgaattgcagatcaaaatggcgcaaggggcgaagccgggagaaggcggtcagcttccgggcaacaaagtatatccttgggtcgcggatgtccgcggttctacaccaggtgtagggctgatctcaccgcctcctcaccatgatatttattcaattgaagatttggcgcagctgattcatgatttgaaaaatgcgaatcgaagcgcgcgtatcagtgtcaagctcgtgtcaaaagccggtgtcggcacgattgcggccggtgtggcaaaaggcactgcggatgtcatcgtcatcagcggctacgatggcggaacgggcgcgtcgccgaaaacaagtattaaacatacgggtcttccgtgggagcttggtcttgcagaagctcaccaaacgctgatgctgaacggtttacgggatcgcgtggtattggaaacggacggtaagctgatgacaggccgggatgtcgtaatggccgccttgctcggtgcggaggaattcggctttgctacagcgccgcttgtcgttctcggctgcgtcatgatgcgcgcctgccatttagatacatgtcctgtaggtgtcgcgacgcaaaacccggagcttcgcaaaaaattcatgggcgatcctgaccatatcgtaaattacatgctgtttgtcgcagaagaagtgcgtgaatatatggcgcagttaggctttaagacgcttgatgaaatgatcggacggacagacgttcttcatgtcagtgaacgtgcaaaagcgcattggaaagcgggccagcttgatttatccacactgctgtaccagcctgaaggcgtccgcactttccgtacggcgcaaaatcataaaatcgaccagtcgcttgatatgacggttattcttccggcggtgcaggctgcaattgaagccggacaggaagcggaagctgaaatcaagatcaataatacaaatcgcgtagccggaaccgtgacgggaagtgaaatttctaaacgctacggagcggaaggcctgccggatgatacgatcagacttcattttaccggatcagccggacagagtttcggagcatttgtccctaaagggatgacgcttcatttgaacggggattcaaatgactacgtaggcaaagggctttcaggcggaaaaatcatcgtgaaagcgcctgatgccttcaattgtgaaacgcacgataacgttattatcgggaacgtcgcattttacggagcaacaagcggggaagcgtacattaacgggcgcgccggtgaacgttttgcagtccgtaacagcggagtcaatgtcgttgtagaaggtatcggagaccacggctgtgaatacatgacaggcggccgggttgtcgtcctcggcgaagtcggcaaaaacttcggggcgggaatgtcaggcggtatcgcatacgtcctcagtgatgatgccaaagcatttaaacgcaaatgcaacatggaaatgatttcatttgaaaagctgacggatgaggcggagatcaaagaagtgcaagaaatggtcaaacggcatgcggtgctgacaaacagcaaaaaagccgcagatctcctggacaattgggaaaaagccgcagaaacctttatcaaagtcattccgaaaaactataaacaaatgctcctcagcatcgaagaacaaaaagcggcgggtttatcagaagaagacgcaattatgtatgcttttgaagccaatacaaaggtcctccaaacgcctgccaaagatcaaaaacaagcggtagtacagtaagaaaggggagaggaacatggggaaaccaactggattcatggaagaaaaacgagaaaaaccggctgagcgggaccctctcactcgcttaaaggattggaaagagtattcggctccgttttcagatgaagcgtcaaagcggcagggggcgcggtgtatggattgcggcacaccgttttgccaaatcggcgctgatatcaacggttttacctccggatgcccgatttataatctgataccggagtggaatgacctcgtctatcgggggcgctggaaagaagccttggagcgccttctgaaaacgaataactttcctgaattcacagggcgggtctgtcccgctccttgtgaaggatcttgtacgctggctatttcagatccggctgtttcaattaaaaacatcgagcggacgatcattgacaaaggttttgaaaatggatggattcagccgagaattccagcgaaacgcacaggtaaaaaagtcgctgtcgtcggttcaggcccggcaggtctggcaagcgctgatcagctgaaccaagccggtcattccgtaacggtctatgagcgtgctgacagagccggcggtctgctgatgtacggcattccgagcatgaagcttgagaaaaatgtcgtcgaacgccgtattaaacttttgacgcaggaaggtatagattttgtaacaaataccgaaatcggcgttgacataacggcagatgagctgaaagatcaatttgatgccgtcattttgtgcacaggcgcccaaaagcagcgcaatctgctgattgaaggccgggaagcaaaaggcgtccattatgcgatggactatttaacactggcgacgaaaagctatttagattccaacttcaaagacaaacaatatatagacgctaaagggaaagacgtcatcgtaatcggcggaggagacacaggagctgactgcgtggcaaccgcgctgcgccaaaaagcgcgcagcgtgcaccagttcgggaaacatcctaaacttcctcaaacgcgcacgaacgacaatatgtggcctgaacagcctcacgtctttacccttgaatacgcctatgaagaagcgcaggcaaagttcggcaaagacccgagagaatattcaattcagacgacaaaaatggtggccgataagcagggccgcttacaagagattcacaccattcaaatggaaaaagtcagaaacgaattcggaaagtatgaatttcatgaactgcccggaacagaaaaagtctggcctgctcagctggtgttcatcgccatcggttttgaagggacagaacagccattattgaaacagttcggtgtcgattcggcaaatcataaaattcaggcggcatatggggattataaaacgaatgttgacggtgttttcgccgcaggggatgcgagaaggggccaaagcctgattgtatgggcgattaatgaaggccgggaagcagcgcgcgaagtcgatagttatttaatggggagcactgttttaccgtaaataaaggggtttatttataaaaccggctgggatcagccggtttttcgtattgaaatgaaacctccttcttcctttattggtcatataagggtaacgtggaagataacatatggaattttgttttacagagtggagagattgttttcttccgcagactgagacgatttgcaagccttgagcagtcgatcacggtgctgctgacgggctctgtgtgtctgcagtcgatttgcgggcagattttaattgatgaagaaaaacatattgaatttcaagcggaaacgcttataaacaaataaggaacggacgcgtccgctcctcttttttagacatccaaacgaaagccgatattgccgaactgccgtccttcccgcattctgttaaaagcggcagctgcttcactgagagggtacatgcggtcgataatgggacggatgccgcagcggtttaccaattccatcatatccgcaaattcctcattgcttcccattgatgtaccgagaatatgaatctgcggaaaaaacagcgagcgaatagggaatccgagctgatcgcctgaactggcgccgaatgttacgatccggccattcggtttcataatgtcaagatagtgttgaaacaaggcggggcctacaccgtcaagtatgatatctgctttttcgccatacagcgcctcattccagtcaccgtagctgtcaatcgcccggtctgcaccgtatgacagtgcggtttgttttttgttttcactgcgggaggtgacgctgactgtcgctccgatagcttttgccattaataaggcgtatgttgccacgccgcttccgatgcccggaaggataaggtgttcgcctttttttaattgtccttttgtaaataaggcgcgataagcggttaatgctgataacggcagcacgcccgcttcctcccatgtcaggtgttcgggttttaaaacggcattttccgcaggaacgatgacataaggtgaaaaggttccgtcgctcggaccgcctaaaatatcaggtacggccggtacgtcctcaacggtcttccaattcagcaccgggttgatgatgacttctgcatgcagtaaatgagaccggacgccgtgtcctatttcggttacgattcccgcgccgtctgaaccgagagtaaattcatggtttccggtttcgtggtttttcattaaaaacaaatcacgatggtttaatccggctgttttcagctttatttttacttcgccgtttcccggccttttgtcaggtgcctgcctgaaatcaaagccattttcgtgtatgataagggcattcatcattcttctctcctttatgattgatgagaaagattttacaggctgtatcagctgcagtaaataaatgaaaattgatagccggctatcaataaaaatcatagcaagaaggtgcccttacatggaaagcggagacttaaagatttttcaggctgtcgcccgcaaaggaagtatttcaaaggcggcagaaagcctgcattatgttcaatcaaatgtgacaaaccggattcagcagctggaacggcaattgcaaacacagcttttttacagcacaaatcgggggatgacgctgacgcccgcaggtgaaaacttattgaaagacgcagacagaatccttcaattgttgcatgaggcgcaaaaaacggcgcaagaggcaggcgatccgaacggcccgcttcgaatcggttctcttgaaacggcggcagccgtccatctccctcaatttttcacagagtattgcagccgctgcccgaaagtacagctgtctctgtcaaccggtgatacacataccttagtgcagcacgtcttacactatgagctggacggcgcttttgtttatggtccggtcgaatacgaagatcttgagcaagtcgctgtaattcaagaagaattggtcttggtttcaaataagcgggaaggcagtttgcaagacttgttgcgagatccgattctgtattttgccgcgggctgttcgcaccgccgcaaaataaaaaacatactgaaagaagaagcagtgcccgcacataaaatcattgaattcggtacgttggaagccattattggggcggtgcaagcggggatgggggtttcctttctgcctgcatcagccgtccgttattttcaaaacaggaaaaatctttttcttcatgagctccctgaacagtttcgggatatgaatatatcatttatctaccggagtgatttatttttgacatcggcgtttgaagaactgctgaatggattaaaaactttaccgaacggaagatgagaaaacaggacagctgtgtacgccaatttttttcgttctggtttttctcaaaagaaagcgggtatccgggctgagcttgatcagcgcgatgaaaaactcggctattaaatcagagaagcacaaatgaaaaaaataccgtatattgctgttgtgggagatcgagagtgccgccatcaatctgtacatgtaaggcaatacgggcgggaagacacatttgaagagaatgtgagtgattttatttcccggatcataagagaggcaaaacaaaaaatagagatttaacaaaaacaacattgacatatcgtaaaatcacgatataataaagcgtatgaaacctattgatgtttttaaagcgttgtctaatgagtcacggcttgagattttacaatggctgaaagagccggaccgtcacttcgccccgcatgatggcattgatatgaatgagatcggagtatgtgtcagccagatcaccgataagcttcagatgacacagtcaacggcgtctcaatatctttccatccttcagcgggcgggccttatccaaacaaaacggattggcaaatacacctattataaaagagatgaagaagcgataaaggcgatggccgattattttcagcgcgaaatgtagggctgaatcctttagaagagggattcagtttctttttccgactacacatcgacatattgcgatttgtttctgttttcaactctttatatcgatatatcacaatatatctttatataaatcatcaatgaaggagtgtgtcaggtgcaaaatacctggaagatttacattttggcaattatcagttttttagtggggacgtctgaatatgtgatatcagggatgcttgataaaattgcaggttccttgggagttactgtggcagcggcagggcagctgattacgattttttcacttgtttatgcaatcggaacgcctgtcatgatggcccttacagcaaaactggacagaaggaagctcatgatctatgctctggggctgtttgttatcgggaatatcatttctttccttgtgcagggattcggcttatttgcgggagcgcgggtgatcatggcgcttggagcaggaactgtggtggtcaccgcgcttacgatcgcagcaaaaatcgctcccccgggaaaacaggcaagttctctcgcaaccgtcattatggggtttacggcggcgctcattatcggtgttccgatcggaagaaccgtgtctgaagcttttggctggaaggtggtttttgccggaattgcggcaatcggaatcattgccatgcttattatacgtttcgcgttgcctgagataaaaggagataaaccggtgccgctcattcagcaattttctcttttgaagaaacgaaaggtggctgtcgggctggccattacgtttttttggctcggaggctattcggttgcgtatacgtacctttctccgtatttactgaacgttactcatatcggaagcggaatactgagtacattgctgcttattttcggtgttgcaagtcttgccggttctaaagcaggcggtttcagcgcagacaaatggggggcgcgtatgacattaaccggcggaatggcgcttcatgctatcatgctcatgttattgccgtttgtcacacattctgctttcggagcggcggcagtgcttattttttggtccttcgccgcctggtcatctgggcctgctcagcagtatcatttggcaacgatggagcctgaatcatcgggtgtattacttggcctcaaccagtctgtcatgcagctggctatggcagccggagcgggcatcgggggcattgttgtcacccatctgtctcttgcgtcagtgacatggatcggatcagcgggtgttgtcatcgcgatgtgcggcgtgctttcgcttgcgtcattaacgtctgaaaaaacctcatctgaatacagtgcagaataaacaaaagcctcatttctcagcttgagaaacgaggctttttgtcttgtcatttttcacattttttcaagtttacgccgattgcggctccgtttcggcttgagtcggcaactccggtgaaggtgccgttttcacggtcgatcaggatgctttgcacattcccgatatcaaccgggctgctgccgaatttatgccccatttcgttcagttttgtgcgggcttcttccggcactcctttttcatatcgataggatgtcatgctgtttgtgtaaattctcggctcttcgaccgccgctttcagatccatgccgtactcaactttgttcaggatcgtttgcaggacggaagaaataatcgttgctccgccgggggagccgacagtcaggacaggttcgttatttttgaataaaatagtcggagtcatgctgctgagcggacgtttattcggctgcacttcatttgcaccgccaggcaccgcatcgaagtctgttaactcattattcaacacaacgccgtatccgggaaccataatgccggaaccgaacagctgttcaatcgttgtcgtataagatacgacattgccgaagcgatcagttaccgtgaagtgagtcgtttggccttcttgtttgtcagtcggctgctccacttgtttatagtttgcagaaccttcctgataggcccaagggtcgccggctttcggttttttattgactttatcaatatctatcagctgtctgcgggcattgatataatctggattcaagaggcctttgagagggacgttgacgaattctggatccccggcaaatgcggcgcggtcagcataagccaaatgcatcgtttctgcgagaagctgatatttttgccaagaacggatatcatattgagaaagcttaaaatcatccagaaggttcagcatttgcaacaggaaaacaccgcccgagcttggaggaggagcagttgcgatatgatagccctggtaatctccccagatcggttcgtcaatcgtcacattgaagtttttaatatctttttctgtcattgagccgccgaattcctgcactgtttccgcaagctttttggagaatgctccgtcatagaatgcttttgtgcctttgtacttaatagctgtaaatgttttggctaagtctttttggatgagtgtgtctccttctttcagaggttctccgtccggaagaaacacgtcttttgcagcagtgtgtgataatttgtctttataatctgagatggcatcagctaaaaccgaatcgatcggaaagccttttgaggcaagtttaatggaaggggtgatgagttgtttcatggagcgtgtgccccatttgtcgagcgctttttcaagtccttttaatgttcccggaacaccgactgcagtccctttcgtaacgcgttcggagaaagggatggctttgccgttttcgtcaaggaacatatccggtgttgcgcctgccggtgcgcgttctcggctgtcgataatggtggtgtctttcgtcttcgcatcataaaccatcataaatccgccgccgccgattcctgacatcataggttcagttacgtttaatgcgaattgaatggcaaccgcggcgtcaattgcattgccgccttttttcagcacgtcggcaccgatttgtgaagcgagagggtgggcggtggcaaccatgccgtctttgccgacatctacctgtttgtagtcgtcataggaaaacgggtgtttcttagcctgagcgtgataagggatgcttccggccgcgagcaacgtactgagcagaacgataaaacagagattcataaactttttctttttcatagtctgcctcctttgttttccgcttacaattatagagtaagtaaaatgtgctgttttcacaagtgacaaacggaatagtccggtgcgcaaaaagccggagtttctgtgtgaatgtaatcagtcgcaaataggctaaatgggaaaccggactgaaaaagctgtgaaacaagcataaagacaaaaaataagctacaatgaacaaaacagaattcactcacatgacatatgaaaggaacgtgagccatgtatttaacgatcaaagagacagcggagtttaccagtcttcctgaagaatatgtgcacaatcttgttttgacgaataaaataagggccgtccatgacggacagcaatatttaatcaacaaggaacaatttcaaacccatctcgagcagttggaaaaatacaaggaaatgattcaagagtttttaaatgagccgcttcctgaagacattgatgtaaaagatgaagactaggacacaatttcatattgtgtcttttttttgcatttttttcggttgctcacaaaaaaacggatgctcagatttcattttaaggccgttgttttcattttttaatgccttgagtctctatttgtttaaaagcttgtcaccggtctgaaaatgatgtttttgaggaatttgttgaaactgcgtatctgattcaccttatgtaacactatgtatattatgttacataagaccctttatcctttatcattcaacgggtttcggctataatagtaacataatgctcaatatgttactttactattataaggggttttttgatgcatatcgtacagccgatccgaagtttggagaagatccaggaagtcaaacagtatttaatgaagaaaagtgatcgtgattattttttatttattttcggcatgaacagcgcactgcggatttctgatgttctgccgcttcgcgtgagggatgtaaggaacaaagaccacgtgtgggcaaccgaaagcaaaacgagaaagaaaagaaaaattctgatactggagtctttaaaggccgacatatacgcttatacaaaagacatgaaagaagatgactatttgtttaaatcgaaacggacgaataagcccatatcccggattcaggcatacagaatattaaaggaagcggctgccgcttgcgggttggaggaaatcggaacgcacacgcttagaaagacgttcgggtatcatttttatcagaggacaaaagacattgctgaactgcagaggattttgaatcattcttctccgtctattacaatgcgttatatcggaatagatgaagatacgacgagagccgcctataaagtgttcggaggactgtaggcttgaaaaaaacggccgccagcgttactataatagaagcaggctctagtagcacagcggatagtgcagcagtttcctaaactgcaggtcgggagttcgaatctctcctagagcgttttttgtatgagataggcgcagcttaataatgtcggtaaaacaaaaacccccttgttatacaagggggttttgagttgaatattttgtgagaacctggtggaaatgatgtgaaaaaagcccgctgtaagcaagcgggctttttcttatatgacagcatcaaattgattgactttccaaacgttgttttcttttacgaatgttacatcgcgttttgctgacggagaaccgtcaagagtcggtacagtgaagcggtatgtttggacgcttccttttttagaaagaagggtcatttttgcttttttccaattcaggaggttatctccatcgccgaccggaacagccaatttgccgtcttttacagtgaagtggtaatctttgagccctttgtcaatcgcttgctttgtaaaagcgggtgtcagatattttacggctttcgcttttgttccgaggtctttgcacataaatacatattgcagattttgatattcaaacggttcagatgtgcaatttgcgtttgatttaagcgcaccgccgctcattgtattccagaaatgttctctcgctgacagggccagctgaagtgcttgtttttgtgtaaggtcattaggtgcattttttgcagtcgccgcagtgcccaatgatagaatcaatgtaatagtagtgaggaataatagccattttttcatgatataatctctccttcaatcaatctctttctcttatgttacaaatgttacaataattacggtaagattacaataccttttcagaaatattttccggactttttatttttatggtttatttccatgtaagacgtgagaaaaagataaagagtttcattgaacaaaaggtttttacaagctgtctgctgaataataaaatggaagaaaatcaaaaaaggagtcctacatatggaagtacaagatcatttagaaacagcggaaggccgcggccagtcagtctggcgatcgatgtcactgtttttagtgccgctgcttttaagcaatgtattgcaatctgtcggccaattggtcggaatggtatttgtcggaaggtggctcggagtcgatgcgcttgccgctgtatcgtctttttttccgctgttttttctgctgatctcctttacgatcggaatcggttcggggagttccattctgatcgggcaggcttacggcgcgaaaaacgaagagaggatgaaggcgattgtcggcactacactgacttttacctttatgctcggtgttgtcctggcagttgtcggcagtgtgtttacgcttgatattctgcggctgatgggaacgccggaaaacgtaatagatgtcagtgtccgatatgcgcgcattttgttttgcgcaatgccgctgatgtttttatattttgcgtatacgacatttttacgcggaacgggagattcaaagaccccgttttatacgttaatcgtcagtacagtcataaacatcgggctcttgcccttattgattctcgggcttttcggacttccgaagttcggcatttacggttcggcgtatgcaaccgtgatttcaaacatcgtgacatttatcgtactcatgatttatttgcggaaaaggaaacatccattggcatttgaccggactgcgctccgttctcttaaaatggacaaaaagctgctcgcgcttttactccgtctcggtattccgtcgagcatcaatatgattctcgtgtcactttctgaaattgcggtcatttcatttgtcaatcattacggatcaaacgcgacggctgcttacggggtcgtcaaccaagtggcgagttatgtgcagatgccggcggtaagcctcggtatcgccgtttccatttttgccgcccaatccattggcgccaatcaattcggccggctgaaacaggtcatcaaagtcggcatcggcctgaattatttgatcggcggggttttgattgtgctgatttacaccttctcccggcagatacttgctttgtttttaacagatcaggatacactccacattgcccgcaatctgattatgattaccctttggagctatttgattttcggtcacgctcagatcgtttcagcgacaatgcgggcgagcggtacggtgttatggccgacgattatcagtatttttgcgatttggggaattgaagtgcctgtggcctttattctttctcattatacgaatctcggcattctcggcatttgggtcggttatccggcggcttttgtcgtcagcctgctgctgcaatacggatattaccggtttgtatggaagaaaaaacagattacccggctgattcaataaggttttaccgcacatcgctcagttcatacgggcgatgttttttttagagaaggaaaatgagtttagaaaatggaattcctatacatgtagaaaacaaggaaagggcaggtgcttatgacgattgaacatacgacttatttaggggcttcagccataaaagcggagactgatcaggctgaatgcatcattgtgccggagtggggatcaaatgtcatatcgcttcgggataaaagaaccggtatgcggcttctgagagaaccggaaactgcggagcaattccgcaaaaaaccgatgctgtacggcattcccgttttattcccgccgaaccggattacggatgggacgtttcgttttgacggccgcgcgtatcaatttgagataaacgaagaggataaacataatcatattcacggctttcttcacaatcagcattggaaagcggcggcagcgaaagaagagggggatggaatgacagtcgaaacagaaattgatctttcaaagattccccgtgttcataaacaatttccgcacgatgtcattgtccggatgacctatacattaaaagacaatgtgtttacgcagcgggcgctgattatgaataagggaacggaggcttttccttgggggctcggctatcattcaacttttgttttcaatgaagagcgatcccgtctatttttgacggctgaccgcatgtgggaattaaatgaacgtttcgtgccgacgggccgtttattggatgtgcctgataaagaagcgttccgtcagggggtgtctttgaaaaataaacagtttgacgatgtttttctttcttccggacggaatggcggcaataacgaagctgttatttatcatccggatgagcaattatccgtgctgtatcaagcagacatgtctttcaagcattgggtggtatataacggtgacggaaagcaagggtttgtcagtcttgagccttatacttccgttacagatgcatttaatctgaatcagcctgcatcactgacagggcttcagattctgaaaccgggcgaagaagcggctgcgtcatccaggatcaccattttgcatgacgaagaataggaaagaggcgggataacattgaaaacatatgtgaaacgcttgagcgcggtgattctgcttttggtcattgccgcagttccttatattgatgaggcggctaaggcggctgaacaaaaaaatactttgcaaaaagagctggaacacattctggatgaagaacctgctttaaagggagtttcagcgggcgtcagtgtccggtcagcaaaaacaggggaggtgctgttcggcagccgggaagatatgcggctgaggcctgcatcactgatgaagctgctgacggcatctgcggcgctttccgttctcggagaagattacacctttaagacagaagtacgggcagacggcgccgtgaaaggaaaacagctgcgcggaaacctttatctcaggggaaaaggcgatccgaccctattggcttctgattttgagaagatggctaaacaggtcaaagccagaggcatccatgtcattaaaggagatctgatcggggatgattcgtggtatgacgataccaggtattcagttgatcttccgtggagtgatgaaggccaatattatggcgcgcaagtatcagctcttaccgcttccccaaatgaggattatgataccggaacggtgattgcggaaatcagcccggcaaaacagcccggtaaaaagccgcgcatttcgatttccccccatacggacgtcgttcgtgtgaaaaatgaagtgaaaaccgtcgcttctgatgaagcgaaagaattgacggttgaacgggagcacggcggcaatgtgattacgataaagggaaccatacctgccggctcggcaaaggcaagagaatgggcggcggtgtgggatccgtcgtcctatgctttagatttatggaaacaagcgcttactaaacagggtataactgtaaaagggaaaatcagaacagggcgaatgccgcaccgcacccagcttgtcacatcacggacatccatgcctctttcagaattattgatcccgtttatgaaactgagcaacaacgggcacgccgaaattctgatcaaggaaatgggaaaagtgaaaaaaggggagggcagctgggaaaagggcttggacgtgatgaaatcggagctcaaatcgttcgggctcaatccggataaattgattgcaagagacggatccggcgtttctcatattaacggcgtatccgccggtcaaatcggagagcttttgtatgcggttcagaaagaaaagtggtacccggctttccttcgttcgctccctgtcgccggtgcaagcgacagaatgacgggaggcactcttcggaaccggctgaagaatactccggcagagggcaaaattaaagcgaaaaccgggtcactaacatcagtcagttcgattgccggctatgcagacacaaaaacaggagatacgcttattttttccgtgcttcaaaacgggctgcttgacgaagatgacggaaaagacattgaagacaaaatcgcagtcgtgctggcaaatcaataagaagggccgaatccttagaggattcggctttttttgatgtctgtaaaacattatattgcgattatgaatcaatcttttcaaaaagtaatatcggcaatacccttccttttttttacataccgctttcttacatgttcaccgattattcattttttaacataaaacttcttttcgggaggaaaacctttttaaaagcgcaattaattatacattttattccttattatagtgtttaagaaccagtttacagtatgcatacataccgttttacatggtataaagattatagaaatgaagaagtgaagtgaggaatatatactatattctaaaaaatgttagagaaaatttaattttttattgtgatttctaaaatatgttttaaaataatgcttatatggatgattaagtcatatgctgtcgaaatttaattgtaattatttcactttcttatcctcttaaattgaagcggagggattccattggagaacactgtttattctttaactcacgcacaaagaagagtgtggtttacggagctgctcgaaccgggcacaagtatctgcaatctcgcggcatgtgtcaaattcaggggggacatcgattttgacgtactgcgccatgctttagatttttctatctcgcaaaatgattcgctcaggtttcaactgacagaaggggacggatcagaaccccagctgtatctggcggggcatcggccgatttctctagagactgttgattttactcatactgatcaggcagagcgggacgcatggattgacacgcagacccgtgttccgttcaagctgtttcattcacctctgtatcaatttactctgcttgtcatgtcagacgaagaagtttggctttattcaaaatttcaccatattatcatggacggcatctcgctcaacctgctcggcaaccagctcattgatatctaccaaaagatcatgcggagcgaggatttagctgaacatcacaagccttcctatctcagctacatggaaaaagaacagcaatacttacagtcttcccgttttcaaaaagaccgttcattttggactgaaacataccgaaccgttccggaacacctttcactggcggaacgaacctctcatcttagacaaagcactgcggcttccagagatacaatcactctttctcactccttagaacaatctatccggcgtttttgcaaagaaaataatatcagcatcatctctctgtttatggcttcgttatacatatgcatcagccgtctgacggctaaaaaggatattgccatcggcacttattacggaaaccggggctccaggctcgaaaaggatatgctcggcatgttcgtcagcacactgccgatcagaatgacggcagatcctgatgcagagttcctgtcctttgtccgcagcgtaggaaaagagcagctgtctgttatgcggcaccagaaatatccttacaatctttttgtgaatgaattaaggcagactcatcatgacctgcaaaatatcatcggtatttcgatgcagtatcagccgcttgagtggcgtaaggcagacggtttcgattatgaaacggccatgtttttcagcggacataccgcaaacgagctctccattttaattaaggagcggacagatacgggattgattgagctgaattttgattaccaatccgctttatttactgaaacatcaattaaacgcattcaaactcatttgctgacgatcgttgaaaatgccgttagaaatccagaccggctgattcggcatattgatatggcggatgaaaaagaaaagaaacgggtgttatcttcgtttaaccgtacagaagcggttgaaccgccggctccgacgcttcacgggctgttcacccgccgtgccgcgctttcgccgcatcgtccagcgcttcgttttccgggcggtatgctgacgtacgccgagcttgaccagtacacagacagactcgctgtttggctccgacaaaaaggcgtccgcaaagaaagcatggtcggcgtgctcgctgaacgctcgccggagatggtggtttcagtgcttgccgtgttaaaagcgggcggcgcctacgtgccgcttgacccggagtatcctgaggacaggctgcgctatatgctcgatgactgcggcgcttgtctcctgcttgcacagccgggattatccgtttccggtttttccggagaaacgctagaagtgtctctttctgctctgacaggcgagacggagacaggggctgtctctgaagaagcggatagcgattcgctcgcttatatcatttatacgtccggttcgacgggaacaccgaagggagtggctgttgaacaccgtcaggccgccgcctttttatcagggatgcaagggcagttcccgttgacggaagaggatattatcgttctgaaatcatccttttctttcgacgcttccatctggcaattgttttggtggacgatgtccggcgcctccgtgtatctgcttcctgccggctgggagaaagatcctgtgcggatgattgaagcgtttgcctcagaaaaggtgacgaccgcgcattttattccggcgatggtcaacagctttttagatgcgctggaaacagagcctgcggaaacaagaacacgcctcggcagaaccttgacacgcgtgtttgccggaggggaagctctttcaccgcttacggctgcccggtttgccgatcttctgccggagaccgtgctcattcacggctacgggccgacggaagcgacggttgatgcggcgttttacgtctgtgaccgaaaacgggacagcggacggacaaggcttccgatcggaaaacccgttccgggtgcccgtctgtatgtattagatagcggaggaaccatccagcctgcgggcgtggcaggagagctgtacatcgcggggacaggggtggcccggggctatctgaaccggcccgagctgacggaggagcgttttctcgatgatccgttttatccgggagagcgcatgtatcagacgggcgatatcgcacgctggacagaagagggcctagtcgaatggctcggacgttcagacggacaggtgaaagtccgcggctaccggattgaaccgggagagatcgaagcggcgatccggcgcatcgacggcattcgtgaggcggcggtcaccgcccggaccgaacacggcgaaaccgcgctttacgcctatatcgaaggacgggaaagcgatgacgtgcgggcggagcttgcgacacgccttccggtctacatgatgccggctcagtttatagagatgagcgaatggccggtcacgccgagcggaaagcttgaccgccgcgcgctgccggctcccggcggagcggcagacagacaggcgtacaccgccccgcggaacgtcacggaaatgaagctttgcgccctttgggaagaggtgctgaaaaacggccccgtcggcatccgggatcacttttttgagcggggcggccattcgttaaaagcgacggctctcgtctcccgcatcgccaaagagttcggtgttcaggtgccgttacaggacatcttcgcccggccgacggtggaagagctcgcttcggtcattcaggatttggaagagagcccgtatgaagcgattcagcctgcgaaaaaacaggacacctatccggtgtcttcggcgcagaaacggatgtatgtgctccagcagcttgaagacggcggtgtcggctacaatatgccggctgtgctggaactgacgggcccgcttgaccgcatccggctggaggagacgttccgggagcttgtggagcggcacgagtcgcttagaacgtcctttgaaacggggcctgacggcgaaccggtgcagcgcatccatgacagcgtgccgtttcagctggatgaggccgagtcagctgacgcattcgtccggccgttttgtctggaggaagcgccgctcttccgtgcggctctcgtgaaagaatcagacgaacgccatctattattaacggatatgcatcatattatttctgacggtgtgtccgtcaacaccttgattaaagaattcggcgagctgtacgcaggccgttcgcttgcgccgatgcgccttcaatataaagactatgccgtctggcagcggtcatttcaggagaaagaagggtaccagaagcaggaagcctattggctgaagcggcttgaaggagagcttccggtgcttgagcttccggctgacaagccccgtccggctgtcagaagctttgcgggcggcagcgtatcgtgcacgcttgacgctgaaacggcatccggccttcaccgcatcgcccgggatcacggctccactttgtatatggtgcttctcgccgcgtacaatacgttactcgcgagattgagcgggcaggaagacatcatcgtcggctcgccgattgccgggcgtccgcacaaagaccttgaaccgattctcggcatgttcgtcaacacgctggccatcagaacggagccgaaaggagacaaacggtttaccgattacttggcggaagtccgccaggcggcgcttgaggcgtatgagcatcaggactatccgtttgaagagctggtggaacggctcggggtgcagcgggacatgagccgcaatccgctgtttgatgcgatgtttattcttcagaatatggagcgagaagagataaatctggccggtctgaaggtgtcacgatcagaacataccgaacatgatgtatcaagttttgacctgaccttatcagcggctgaatccgatggaaacatccgctttgaaatggaattcagcaccgagctttttatgaaagaaacgattgaacgctggatgggccacttactgaatctcttgcgccatgttgccgccgaaccggaagtcacactatcgaaagctgacattttggatgaagaagaaaaacaaaagttactgattgagtttaataacacacaaaccgaattcatggaaaaacacaaactgtttcaccagttgtttgaagagaaagcagaagaaacgcctcatcagaccgctgttattgaaggaacacaacagatcagctattcgcagcttaatgagcgggcaaatcggcttgcgcgaacattacacaaatatggattcggtccgggaaaaagagcagctatattggcaaaccgttcgattgaagcgatcgtcagtgttcttgccgtcatgaaatcgggaggggcgtatataccagttgactcccattatcctgaggaacggattcgctatttattaaaagacagcgcggcatccgtcttgatggtgcagtcagaatacaaagaacttgcttcacagctgacggatcacaatttatttctcattcagcttgatcatgaagatcaatacgatatttgtgcaaagaatattcagccggcagcgtcaccggatgatactgcatatatcatatatacttcgggaacaacgggaacgccgaagggagtcgaagtcagaaatcgcagctttacgcatgcagcacttgcatggcgcaggatttatgagcttgatcttataccggtcagagtgctgcagatggcgagtttctcatttgatgtattttcaggagatcttgcacgcgccctgctaaacgggggaacgcttgtcatttgtccggatgacgtccggcttgagccgcaacagctttatcggctcattgatcagtaccgtatcacgtttatggagtcgacacccgcgctgattgttccgtttatggaatatatatatcgccggaagctcgcgctgcaaagtgtaaaaatactggtactgggttcagatatgatcaagtcgcaggatttttatacgcttcatgaacgcttcggaaaagaaatgcggatcattaacagctacggtgtaacagaagcgacaattgattcttcgtattatgaagccgaaatgagcgaaaagccgcaggaagatgatgtgccgatcggtgttccgcttccgaatgtacaaatgtacgtcttaaacaaagacaaacaggtccagccgatcggcgttttcggagagctgtatatcggaggggccggcgtcgccaaaggatattggggacagcctgagctgacagagggcgcattcagtgacccgttacaaacgggagaaacgctttacagaaccggagatcaggcttgctggctgccggatggtactcttcgttttcaagggcggattgataagcaggtaaaaatcagaggctacagaattgagacgggagaaatagaaagtgtgcttttgaaacacgatcaagtcaaagaagcggctgttaccgtgatgaaagatgccgaaggacaagcccgattagcggcatacatcgttcctaaagaggccgatatctcatcacttcgccagtctctaatgcaggagctcccggcttatatgatgccgtcccatattatcggtttagacagcatgcccctgacactgaacggcaaacttgataaatcggcattgccggcagaagagatacattcatcccaggcatttgtcgcgcccggcgatgaaaaacaggcgatgttatgccggatttgggaagatgtgcttcatattcagaaagcgggaatccatcactctttctttgagcttgggggagattccattaaggcgcttcaagtgtcagcccgactcgccggagaaggctggaacatgtcgatccgcgatttgtttcaattcccgacgattgcagaactcgcgaagcacctcacgccggctgttgcaactgctgatcaggggccgatagaaggaagcgctccgctgacaccgatccagcagagattttttgaggagccgggtgcgtttgagcttcattataaccaagcggtcatgctgtgcagtgaagacagcctcgaaatagatgcgctgtatcaggcggtttgcgcgctgaccgaacatcatgatgcgctgcgaatgactttcactgaaaatgagcatggggaaacggttcaatataatcgcggaatcacaaagcagtatgaagaaatatttacgcttaacgtcatagatatttcagaagaaacgcagcccgaaaaacggatagccgctgaggaaaaagaaatacagcaggctatgcgtcttgatcaggggcctctgcttcatctcggagtgttccgtcagaaggaagccgaccatcttcttataacgattcatcatcttatcacggacggcgtgtcatggaggatattgcttgaagatctgcagacagcttatcagcaggcattggacggcaaacaaatcgaactgccgccgaaaagcgattcttatataaagtatgccgaagaactttttgacatttccaaaagcaaagcattgctggaggaagccgcatactgggacagcgtgatgtctagtgaaacagcgccgctgccgaaaataactgatgaaaacgccggacgattgcaggaaaacgcgcgcactgcatcgtggatattaagcagcgaagtcacgaaacagctgctgttggaaacacagcaggcatacggaacggatgttcatgaattgcttttaacggcgcttggaatggcgcttcatgagtggacgggttctgaacagatccttatcagcactgaggggcacgggcgccaggggcatatgcctgacattgatatgtcaagaacggcaggatggtttacatctgtttacccggtgcttttggatatgagagtgtcgggaggctcaggcgaaaaaaccgctcaccgcataaagacggtaaaagacatgatgagacgggttcctcatcacggaaccggctacgggctgctgagatattcgcgaaacattctttataaagacccagaaataagctttaactatctcggtgcgtttgacggtcttgaagggacactgaagatgtcaccgttcaagccgcagcatgatatagcggccgggcgcatccgcgaatttgatctggatattaacgcgatggtggcggccgggcaactggaggtaaaagccgtttataccgatgtatttgcaccgggggcaatcgagttcttcatgaatcgtttccatactcacctcgaggacatcatcgcccattgttccggcaagaaagagcgggaaaaaacattaacggattacagccatacagaattgaccgctcaagcactatcaagcattgaagatctcgtaaaaggactttaatttcataaaaaggtgtgtggcattcgtgacacaagcgacagaaattcaagatatttaccctttatcatatatgcaggaaggcatgctgtttcattcgcttctggattccggatcaaacgcatatgtcgagcagatttcgtttacggtcagcggggatttatgcattgatacattccaaaaaagtctggatatgcttgtcagccgttatgatattttcagaacgattttcataaaagaagtgcctgaccttgaaggaccgcagcaggttgtcctttcacgccgtgacacagccgtacagactgagaacatttcagactattcggaagaacggcagcaaagcatcattgacaaattcaaggaaaccgaccggcataaggggtttgatctgcaaaaaggccccttaatgcgcctgactctttttcaaacgggagaaaaccgtcatacatgcgtttggactcatcatcacattatgatggacggctggagcttgggaattgtactgaaagatttcttcagcatgtattatgcgatccgaaacgggcggcctgtaaacctcggcagtccggctccttacagcacttatatcaaatggctccgaagccggaataaagaagaaacgtcagcgttctggtcgcgctgcttggaagattacggagaaatcgtttccgttccgcaaacgaagaataagccggcgcagaacggttatgcatctgagcattttcaattttcccttgagtctgaaaccgtgcaaaaactgacagacattgcccgaagcacaggggtcacgctgaatactatatttacgggcatttggggcctgcttctccatcgttacaacgggactgaagatgcggtcttcggttcggttgtttccggcaggccgtcagctatcgccggcattgaatccatggccggactgtttatcaataccgtgccggtaagggtgcgcgcggctggtgatatgactttttcttctcttctcaaaaaggtgcaaaaagagtcactcgctgcggaagagcacagctattatccgctttatgacatccaaaacgagagcggcctgcaaaaagatctcttgaaccacatcctggtttttgagaattatccggttcagatgcagactgcggtaaacggctggcagcaaacggaaagcaatgcgctctcccttgaaaacttttcgatggcggaagaaaccaattacgatcttaacgtcgtcatcgttccgggagaagagttttatgtgaaattcagctacaatgcgggcacctacgatcgggaagacatgaaacggatcaaagggcatattctggaggtcatctcctgtgtaacggaagatccggacaggcttttatcaagcatcagtctcgtacctccggaggaagaagccctgattcattcgtttaacgaaacgaaccgtccgtaccctgagacaaccgttcatgggctgtttgaagaacaggcggcaaaaacgcctgaccaagaggcgttgagatataacggggtaagctggagctacaaaaaattaaatcagcgggcgaatcagattgcccatgcgttaagggaaaaaggcgcccgttccgatcagatcaccgctgttatgctgcgccgatcaatgagtacggttgccgctctgctcggaatttggaagtcgggcagcgcctatatgccgattgatgcggaatttccgcctgaacggatttcatttttactgagagacagtgaagcctcactgctcgtgactgaaaaagacctgctccccctcattccgccgcatttcaagggcagcgtcgtcatcttggaggaaacggtttcccagcagaccgcaccgcttccgccggtatctgacagcggaaattgggcgtatgtcatttacacctccggaacgacaggccggccgaaaggggtgcttgtacaacacaaagcgatcagcaatacattgcaatggcggcgtgaagaatacgggatgacagaaggggacatagcgcttcatcttttttcatacgtatttgacgggtcattaacgagtcttttcactccgcttctgtcgggcgcctgtgtattgttaactgatgaagatgatgcgaaagacgtcctttcaataaaacagaaaatcacccgacacggagtgagccatcttctgatcgttccgtctctgtatcgcgttctgcttgattcgctgacgaaaaaggatgcgcagacacttcgggcggtgacatttgccggggaagcggccactcctgatatcgtggaagcgagccgcggcatatgcccgaatgccgagctgctgaatgaatacggcccgacggaaaacagtgtggccacgacgattctgcgcaacctgcaaaaaagcagccggattacgatcgggcgcccgattgccaacacttctgtctatatgatgcacggagatcggctgcagccggtcggagccgtcggtgaactgtgtatttccggaaaaggtctggcggacggatatttccagcaaaaagagctgacggacaaagtctttacccctcatccgtttcgtgaaggtgaacggctgtacagaacgggagatgcagcccgatttttaccggatggaacgattgaatatatgggacgctttgacgatcaggtgaaggtaagaggttacagaattgaattaggagaaatcgaaacggcactcagaagtctgtccggggtaaaagaggcggcagtcaccgtgcgcaaaatggcggacggggaacaggagcttgcagcttatgtcgtactggaaaatgcgggtgtgacatttaaaccgcacgctgaattggccgggagattacctgcttatatgataccgggaagctttaccaaattaacggaaatgccgctgtctgtgagcggaaaacttgatcgggccgcacttcctgagccgaaagaaaccgagagaaccggtgattatcaagctccgcgcacaatgcttgagactgagctgctgtctatttggcaagaagtgctgaaacgggaacacatcagtatgagagatgatttcttccaaatcggcggacagtcgctgaaagccgcgtcgcttgtttcaaacatacataaacggctgcaaattgaacttgccgtccgccatgtttttgaacatccgaccatcgagagcatggcccgcttccttgaacagaggaaaagaggagaatatgcagaaatcacgcctgctgtggcaaaggacttgtacccgctatcttttgcgcaaaaaaggctctatgcccttcatcagcttgcagcggacagtacgggctatcatatgcccgcttgtctggaactgagcggcagactcaaccgggatcgtctgcacgaagccttttcagcgctgttacaaaggcatgaagcgttacgcacttcatttgttttgcgaaacggggagccgatgcagcacatacatgcacatgtcgatcttgacctcacagagattcacatgccatccgggaaccttcttcaagaggtgatggaaactttcgtcaaaccgtttgacgtggaaaaagcgccgcttttgagagtgactttagccaaagttactgaagaacgtcattttctgctgcttgatatgcatcatcttatcgcagacggtgtgtcaatgagcgttctgattcaagaattgacggatttgtacagaggaaaagagttgcggccgttaaaactccagtacaaagatttttccgtctggcagcatgagcggtttgccgctgaagaattcaaaagacatgagcgttattggctggatgcgatcggggaaaacattcccgttcttgatctgccgctcgataaaaagcgccctcagcttcctgatttcagcgggtccgttgttcgaacgcgccttcaaaaggaaacggcggagaacttgcgccggctcatggatgagacgggttcgacactgtatatgattcttttggcaagctactccttgttcctttctaaattgggcgggcaggaagacattgtcgtcggttcacctgcggccggcagaagccgcgctgagcttgacggggtcatcggcatgtttgtaaataccgtggcaatgagaagcaggccgaaaggggataagacattccgcgcttatttagaagaggtgaaaatgctcgccctcggcgcggccgaacatcaggacttcccgtttgaagaacttgcccaaaagcttgatacacaccgggaagtcaatcgcaatccgctgtttgatgccatgctcgttttgcaaaacagtgataatttcgaagtgaaccttccgggcttatccgtttcttcacatgcagtgaagcatgacatttcaaaattcgacttgacgcttcatgccgaggaacggccggatggctcactggattttcattttgaatacagtaccgcgttgtttgaaaaagatacgatcgaacggtgggccggtcattttaaagagcttttaggacaaatcgcagcggattacgaacggaagctgtctgacattcatttgctgggcataaacgagcggcagatgcttcttcaagcggaaaatcaaacggcggagtatccgaggcatgaaacgattgtcagtttattcgaagcacaggcggaaaaaatgccggatcaaattgcagccgtcatgtctcatgagcgtctcacctaccgcgagctcaatgaaaaggcggatcgaatcgccgatatgctgtcggaaaacggcatccgctccggacagattgtcggatttatgaccgaacgatctccggatatgctgattgggattctcggtattttaaaagcgggaggagcttatctgccgattgatcctgactatccggacgagcggatttcatttatgctgactgacagcggcgcgcgtgttctgttgacgcaatcgggtcttgggatatccggaatggacgggctgccggttttatacatcgataagcctgaatccgtttcagcagacagaacgaaagaaataataacgcctgaacagccggcttacgtgatttacacatcgggcacaacaggaaaaccgaaaggcgttatgacggaacaccgcaatgtcatcagccttatcacacataaaggactgccgtttgatttcggctctgaagacgtctggacgctgttccattcctattgctttgatttttctgtctgggaaatattcggcgcgctcttatacggcggaaaggtagttatcgtgccgaaagacacagcccgtgatccgcatttgtaccggcagctgctgcaaagtgaaggcgtaacggtgctgaaccaaacgccgacggctttttccggactcattcatgaagaggccgggcatacggacaagctgaagcttcgatatgtcattttcggcggagaagcgcttcagcccggcatgctgaaaagctggaaagagaagtacccggagacggagcttgttaatatgtacggtattacggaaaccacggttcacgtcacatgcaaaaaactgaatatggatgatattgagagaaacaaaagcaatatcggcagaccgctggaaacccttcatgcttttgttatggacgcctatatgaatccgcagccgatcggaattcccggtgagctttatatcggcggggaaggcgtcgcgaggggatatgtaaacagggatgatttaaccgcctcccgtttcatcacgaatccgcacgtttccggcatgcggctctaccggacgggtgatatcgccaaaaggctctcaaatggcgagctggaatatgtcgggcggaaagatgcgcaagtaaaagtcagaggccacagaattgagctgggagaaattaaatcagcgctgcaagagctttcctccgtgaaagaggccgccgtgatcacacgtgctgatcagcacggtcagcactccatttacgcatacgcggtcttacacgggaacgaaaagataaaagaagcagagattcaggcctctctcagagcttttctgccggaatatatgattcccgcccgcttgatagcgcttgatgaactgcctttgacggcgaatgggaagctggacgagaaggcgctcccgcagcctgaattaaatgatagccttggaaatgatatcagcctgagaaatgaaactgaagaaatgatggctgacatttgggaagaactcttaggtgttgaaggcctcggtcccaatgctcatttcttccatctcggcggggattcgattaaagcgctgcaagtatgtgcgaggctgaaacagcagggctatgaaacgaccgtccgcgagctgttcgagcatcagacactgggagaagtatcgatgcggctccggaaagtccgccgcgtgattgatcaggctcccgtcacgggagacgttccgctgacgccgatccagcactggttcttgtcgcaatcattgccgcatgatcattttaatcagtcggttatgctccgcagtgcggacagaatcaatgaatctgctatgagaaaagcgttggcacagcttgcggttcatcatgacgcattacggatggtatgcggcacgcaaaacggatcggtgattcaatataacagagcggaaaagctttctgaagaagaactctttacgtttgaaacgcttgacgtgagagggaaagggtcattacaagaggagcacgccgcaattgaacaggcggccgcctgtattcaaacttccattcggctggagacgggtccgctcgtagctgtcggattatttcacgctaatgatggcgatcatctgctgctttccattcatcaccttgtcattgacggggtgtcatggcggattttatttgaagatctcaccgcatgctacaggcaggtgctcgaaggaaaagaaaccgcgcttccggcaaaaaccgattcctatcagacttacgcgaagcaaatctctgattatgctaaaagccgccggctgttacaggaagcagactactggtccgaaagagaaagagcggcggtcgaaccgcttccgaaagatgcccgcatctcttccaatcttctgaaagatacagatgtgatgaccgttacattgacgaaacaggagactgagcagctgttaacggaagcgaacagagcatacacaacagagacgggtgaattattgcttgccgcgttaagccttgcgctgaacagatggaccggaaacgagacattcaaaatcagcatggaaggccacggaagggaagagcacttggagcatcttgatatcagcagaacaatcggttggtttacgtcaatttatccggtattggttgatgcaagttttcaagatcaggctgatgacggcgagcggctcggctatcacattaagcggacaaaagacatgatgcgccgcattccgcataaaggagcgggatacggggtgctgaagtatataagcaaactctgggaagagactgaatccgattctcctgaaatcagttttaactatctagggcagtttgacagggagatccgttccagcggctttggtgtttctcccgtaaaagcgggaaatgaagtcagcccagactgggaacgtccgtacacacttgatatcagcggctccgtatcgtcggaatgtctcagcatgcatgtcgtgtacaaccgttttcagtatcaaaaagaaacgattgaagttttgacgggatattttcatgcctttctcaagcagatcatctcgcattgcacaggcaaagaggagcgtgaatggagcgccgctgatttcagtgacgaggagttaacgctggaagatctgagtgacattatgggagccgtcaacaaactatagaaaaggagtggcgcaatggggcagcaaccggaaatacaagatatatatcctttatcttttatgcaggagggcatgctttttcattctctgttggatcatgactcaagagcctacttcgaacaagcggtgtttacgatcaacggacagcttgaccgggaacgattccaaaaaagtatagatgctgtttttgaacgattcgatattttccgtacgacatttattcataagaatgtggcgaagccccgccaagtcgtgttgaaaaacaggccgagccgcgttcagtttcatgatatttctcatttggacgagaaggcacaagacaaatataccgaccggttcagaaaagaagataaagataaaggctttgatttgcaatcagaccctctcatgagagtctccattttgaaaaaagcgcctgaacgctatgtttgtatctggagccatcatcatatcgtcatggacggctggtgcttcgggattgtcatgaaggaatttctgatgatctatcaatctctgggagacgggcggctcccgtctctcgagcctgttcagccatatggtaagtatattaaatggctcatgaagcaggatcgtaaagaagccgagattttttggaaaacgagacttgccgatcttgagcaatcggcgtctcttccgaaaaaatccgcggaaccaaatggcgaacttgagcaggcggttttcaccatttctgaagagcagacaaatgagctgaagaacattgcggcaagggcgggagcaacgctgaatacagtgttccaggcactgtggggcatgttgctgcagcgtgtcagccgctgtgatgacgccgttttcggttctgtcgtttccggccggccgtcggatctcgcaggcgtggaaaaaatggtgggactgtttattaatacgattcccgtgcgggtgaaaagcggttcattttcttttctggagctcgtcaggcatttgcagcaggagacgctgcaagcagaagcgtacagctattatccgctgtatgacattcaagcgcaaagccctttgaagcaagcgctgtttgaccacattatcgtgtttgaaaatgtgccggcccagcgtgaaattgaaaatgtgagtcagtccggttcatttgattttgcggtagaagatttcacgatggaggaagtcacaaactacggatgcagcataaaggtgattccgggaaattctctttatatccgcttaaactttgataccggtatctacgacagcgtttttatgaagaatatcgaaacatttttacggcatatgatgaattcagtcatctccgatcctgaaatttgcgcctccgagatcgcattgcttgatgcgcgtgaagccagaagtatgctggatgcgtttaaccgtacagaaacggttgaaccgccggctccgacgcttcacggactgtttgcccgccgcgccgcgctttcgccgcatcgtccggcgctccgttttccgggcggtatgctgacgtacgccgagcttgaccagtacacagacagactcgctgtttggctccgccaaaaaggcgtccgcaaagaaagcatggtcggcgtgctcgctgaacgctcgccggagatggtggtttcagtgcttgccgtgttaaaagcgggcggcgcctacgtgccgcttgacccggagtatcctgaggacaggctgctctatatgctcgatgactgcggcgcttgtatcctgcttgcacagccggggttatccgtttccggtttttccggcgagacgcttgaagtgtctctttcttctctgacaggcgagacggagacaggggctgtctctgaagaagcggatagcgattcgctcgcttatatcatttatacgtccggttcgacgggaacaccgaagggagtggctgttgaacaccgtcaggccaccgcctttttatccggcatgcaagggcagttcccgttgacggaagaggatattatcgtgatgaaatcatccttttctttcgatgcttccatctggcaattgttttggtggacgatgtccggcgcctccgtgtatctgcttcctgccggctgggagaaagatcctgtgcggatgattgaagcgtttgcctcagaaaaggtgacgaccgcgcattttattccggcgatggtcaacagctttttagacgcgctggaaacagagcctgcggaaacaagaacacgcctcggcagaaccttgacacgcgtgtttgccggaggggaagctctttcaccgcttacggctgcccggtttgccgatcttctgccggagaccgtgctcattcacggctatgggccgacggaagcgacggttgatgcggcgttttacgtctgtgaccgaaaacgggacagcggacggacgcggcttccgatcggaaaacccgttcctggtgcccgtctgtatgtattagatagcggaggaaccatccagcctgcgggcgtggcaggagagctgtacatcgcggggacaggggtggcccggggctatctgaaccggtccgagctgacggaggagcgttttctcgatgatccgttttatccgggagagcgcatgtatcagacgggcgatatcgcacgctggacagaagacggcctagtcgaatggctcggacgttcagacggacaagtgaaagtccgcggctaccggattgaaccgggagaaatcgaagcggcgatccggcgcatcgacggcattcgtgaggcggcggtcaccgcccggaccgaacacggcgaaaccgcgctttacgcctatatcgaaggacgggaaagcgatgacgtgcgggcggagcttgcgacacgccttccggcctacatgatgccggctcagtttatagagatgagcgaatggccggtcacgccgagcggaaagcttgaccgccgcgcgctgccggctcccgacggagcggcagacagacaggcgtacaccgccccgcggaacgtcacggaaatgaagctttgcgccctttgggaagaggtgctgaaaaacggccccgtcggcatccgggatcacttttttgagcggggcggccattcgttaaaagcgacggctctcgtctcccgcatcgccaaagagttcggtgttcaggtgccgttacaagacatcttcgcccggccgacggtggaagagctcgcttcggtcattcaggacttggaggagagcccgtatgaagcgattcagcctgcgcaaaaacaggacacctacccggtgtcttcggcgcagaaacggatgtatgtgctccagcagcttgaagacggcggtgtcggctacaatatgccggctgtgctggaactgacgggcccgcttgaccgcatccggctggaggagacgttccgggagcttgtggagcggcatgagtcgctcagaacgtcctttgaaacggggcctgatggcgaaccggtgcagcgcatccatgacagcgtgccgtttcagctggatgaggccgagtcagctgacgcattcgtccggccgttttgtctggaggaagcgccgctcttccgtgcggccctcgtgaaagaatcggacgaacgtcatcttttattaacggatatgcatcatattatttctgacggtgtgtccgtcaacaccttgattaaagaattcggcgagctgtacgcaggccgttcgcttgcgccgatgcgccttcaatataaagactatgccgtctggcagcggtcatttcaggagaaagaagggtatcagaagcaggaagcctattggctgaagcggcttgaaggagagcttccggtgcttgagcttccggctgacaagccccgtccggctgtcagaagctttgcgggcggcagcgtatcgtgcacgcttgacgctgaaacggcatccggccttcaccgcatcgcccgggatcacggctccactttgtatatggtgcttctcgccgcgtacaatacgttactcgcgcgattgagcgggcaggaagacatcatcgtcggctcgccgattgccgggcgtccgcacaaagaccttgaaccgattctcggcatgttcgtcaacacgctcgccatcagaacggagccgaaaggaggcaaacggttcaccgattacttggcggaagtccgccaggccgcgcttgaagcgtatgagcatcaggactacccgtttgaagagctggtggagcggctcggcgtgcagcgggacacaagccgcaatccgctgtttgacgttatgtttgtgctccaaaatatggagcgtgaatccctggtgttaaataagctgcatttggctcaagctgcggatacaagtcataaaaccgcaaagtttgatgccacgctttacgcgtcagaagggtctgacggttccatcagctttgattttgaattcaatacagatatctatcaaaaacagacaattgaaaaatggctttcttattttacccgtattcttacaaaagtaattgaaaaccaagcgataccgcttggtgacattcacgtactggatgatgctgaaacaaatcgcgtcatttatcagtttaatcagacgaaaagcgattacccaagacacgaaaccatcagccgtttatttgagcgtcaggcaaaagaaacccccgatgcccgggcagttgtatatgatggacaaatcttgacataccgtgagctgaacgaacgggctaacagaatagcggcggctctccgatcaaatggcgtcggtccggaaagcgttgtcgcattattaaccggccgcacaacagagcttgcttccggaatcctcggaatattaaaagcggggggcgcctacttgcctatcggtgacgatgtgccgcgggaacgggctgaatggatgcttaaagactgtaaagctgatattcttctccaatctgataaacttgacggtctgccgctttcaggaaaacgtttattcatagaggatattcaaacaaaggccggattgagttcgggaaatcccgaaccgctcggaggacctgattcattggcctacatgatttatacgtccgggtcaacaggtgcgccaaaaggcgtcatgattgaacagcgaagcgtgatccgccttgtgaaaaacagcaattatattgattttacgccggaagatagactgttgtttacttcatcattaggatttgatgttacgacatttgaaatattcggtccgcttttaaacggcgcttctttatatgtaagtgaccaggaaacctatctcgactctgatgttctggaaacatttatacaacaaaacggcattacgacactgtggctgacatcgtctctgttcaaccatttatcagaacaaaatgaacacgtgttttccggattatcccgattgattatcggcggggaagcactgtccccgagccatgtaaaccgggttcggaatgcgctgccgcatctctcagtatggaatggatacggaccgactgaaaacacgacgttctcgacttgctttttgattgaacaatcatacgatcattcaatcccgatcgggcgccctgtcggaaattcaaccgcatatatcataaacagcaggggaacaccgcagccgatcggcgtcatcggcgaattgtgcacgggcggagacggtgtggcaagaggatatttcggccgccctgagctgacggaagaaaaatttgtccccaatccttttgttcccggagaacggatgtaccgcaccggagatttagcccgctggctgccggacggaacgatcgaatatgccgggcggatggatgatcaagtgaaaatccgcggttatcgggtcgagctgggagagattgaagcaacactgaggagcctggacggcgtgaaagaagctgtcgtgtcagtcagaaccgggcagtccggcaataaagaactgatcgcatatatgagtctgcaggcggacatggatacagaaaaagtgcgttcttcactgtctaagcaactgccgaattacatggttccggcctatatgatggaacttgagaagctgccgcttacgccgaacggtaaattggatcggaaaaatctgcccgaaccggagctcgcgcttcaaaccgcgtacacagctccccgcaatgagcttgaagaacagctttccgtgatctggcaggaagtgctcggcacaaaacaagtcgggattgaggactcattttttgaattgggcggcgactcaatcaaagcgctgcaagtttccgcacggctcggacgctatgggtggaaaatgacggcgagtgacttattccggcatccgtccattaaggagctcgcgcctcttatccggaaagcggaaagagttatcgatcagcggccggtggaaggaaacattccttggacacccgttcagcagtggtttttatcacagcggatggaaaacagaaatcatttcaatcagtccgtcatgatgttcagctctgacgcattgcataaacagccgctcaaagaagccttggagcatcttgtcattcatcatgatgcactccggatcaccgtcagtgcagaaaacgaaagtttcagacaaatcaatcacggtattcaaaaagatgaactgtacagcttggacatttgggatctgtctgagacagatacttgggaaagagaaatagaaactgaagtggctgcgctccaacagcggatggatattgaaaaaggcccgttattaaaagccggctggttcaaaacccggtccggggattatttattcatcaccgtacatcacctggcggttgacggagtgtcatggcgtattttgctggaggatttatctgccgcttacactcaagccgtaaaaggtcagccggtccagcttccgccaaagaccgattcgtttaagcaatacgctgaaaggctttcagaatacgcaaaaagcagcaagctgatgcgtgaagaagaatattggcgttttattgaagaagaaacagccgccgaacttccttatgaaaaaccgcagcatcagactggagccgacagcattcggcaaacggtaagctttacgcttacagaagaagaaacgtccgttttgcttcagcaggtcaaccgggcctaccataccgatacgcaagatattcttctgactgccgcagctttggctttacgggactggacagggggcggcagactgcgcatcgcgatggaagggcacgggagagagcacatcatgccggagctcgacatcagccgcaccgtaggctggtttacctccatgtatccggtgctcattgacttgaacacagcaggcgctgagcttggaacgtcggtaaaaacggtcaaagacacactcggaagaataccggataaaggaataggctacggcattttaaaatacatgacaccgcctgaacaaaaaacaatccgcttcagacaagcgcctgaaatcagctttaactatttagggcaattcaatgatacagaagatcagcacacgttcagtctgtccggtcttgcaagcgggcacgacatcacgccgacatggcagcgggaacaagcggtggaaatgagcgcgatggccgcacaaaacaaacttcacttcagtttgagctatccgccgagccgcttccgcaaagaaacgatggaacagctgctgcaaactttacagcaatatttgcgtgatattatggcgcactgcaccggcaaagaggaagcagaaaaaaccgttagtgattttagcagcaaaacgttaacatctgatgatttggacagcatagcgagttttgtcgaggaactgtagaaaaaggcgacggggagattataacatgacaaaaaagaatgcaattcaggatatttatccgctgtcttatatgcaggaaggaatgctttttcattccctcctgcaaaaggaatcacaggcttacgccgagcaggcctccttttcaataacggggaaggttgacacccgcgtgtttgaagagagcgttcatgcccttttcgaaagacatgatattttcagaacgatctttatcagccagaacgtgtcagtgccgcagcaggtcgtattaaaagagcggaacgtcagcatcattgaggaaaatctcaccaatttaaacaaggctgatcaaatcaagcatattgaagaagccaaacgaagagaccgtaagaaaggatttcatctgcaaaaagacatgctgatgcgggtgacgctgcttcaaaccggtgaatgtgaatatacgtgcatatggagtttccatcacatcattatggatggctggtgtctcggaatcgtgctgaaagagttcttccagatatacgcctcgcggctccgccggacaccgttaacgcttgagcccgctgtgccgtacgggacctacatcaagtggctgatggagcaagataaagaaaaagccgcttcgtactgggagcggtaccttgaaggctttgagcagcagactgttctgccgaagcagaaaaaagccggcgaaagcagacaagaggaagtgacgttttccttttcaaaagaggacacggctaagctgaaagagctggccgtaaaagaagaggtcacgctgagcaccattttccacacgctctggggcattttgcttcaggcgtataaccagacagaagatgcggtttttggttctgtcatttccggaaggccgtctgaaatcgaaggcatcgagcgaatgatcggcctgtttattaataccgtgcctgtccggatcagcggggcaaacatcccgtttcaaaagctgatcaaaaatgtgcaaaaggatgctttgaaaggacaggcatacagctatcatccgctttatgacatacaggcgaattcacaggtaaaacaaggcttaattgaccacattctcgtctttgagaattatccggttgaacaggagcttgatgtgctgaacagcaagggggacacgaaagacctttttcacatccatgatttcagcatggaagacgaaaccaattacagtttttatcttatggtggcgccgggtgacgaaattcatttgaaaatgagatacgattcaagcatgtatgaccgccaatttattgaaaatatcaaaggccatttggcgcatatcgtctcccaagttctcgacaaaccggacatcacgccggacaagcttgcaatcatcactccaggggaaaaagcgcagctgcttgcgccgatttctgaagagaccgaaaagcctgaatatgacacggttcatgcaatgtttgaacggcaggccgcaaaaacgccggatcaaatcgcgattcggtatgaaggcgagtcagtgacgtacaaagagctgaacgaatcggctaataagctggcccgcctgctgcaaaagcgcggattaaagcgggaggaaccggtaggcgtcatgctcggccgttccccttctttagcggcggctgttctcggtattttaaaagcgggcggcgcctttgtcccgatagatccgggcagtccaaaggagcgtatccgatatgtcattgaaaacagcggctgcgtccatgttgtaacagagcggcatcagtcagtccccgcggaacaaacgctgcaagttacatacatagaagacgccgggacggaagcggacggaagcaatgtgcaatccattaatacggcggacgacctcctttatatgatttatacatcgggaacgacagggaaaccgaagggtgtgctgctcgaacataaaaatatggccaacctgctttctcaccaattgacgaacacagacattgatttttgcacaaatgtgctgcagtacgcatctgtggcgtttgacgtctgctatcaggagttattttcagtactcttgagcggcggcaccctttgtatcgtgcccgaatcaatcaaacgagacgtttctcagctgttttcgtttattgatcagcacaacacggaagttgtgtttttcccgactgcgtttgtcaaaatgcttttcaatgaagaaggttatgcacagtcttttccccgctgtgtgaagcatgtcattacggccggggagcagctgaccgtttcgcgtttgttcaggcagacgctccgtttacacggtatgcatctgcataatcattacggcccgtcagaaactcatgtggtttcaacgtatacgatttctgcgggagatgacatacctgaacatccgccgatcgggaaaccgatccatcataacaaaatgtatattctcagcaaaaacagacagcttcagcctctcggaattgcgggagaattgtatatttccggggcgaatacaggaagaggctatgtgaacaatccggcgctgaccgaagagaaatttttgccggatccgttcagaacggacgccgtcatgtaccggaccggagatttggcaagactgcgtgcggacggccaaattgaatacatcggccggacagatgatcaagtgaagatcagagggtaccggattgaaccgaaggaaattgaaaccgtcctggcaaatcatcatgccgtgaaagaagctgctgttctgattcaaacgaatgagtcgggcgaaaatgaattatgcgcctactgcagcgtctcacaagcgactgatccttctcagttgcgaagagatttggcgaaagagctgcctgattatatgattccggtcaaatgggcttttgttgactcaattccgctcactgcgaacggaaaagtcgatcagcgggcccttccggaagcttcggcgtacgccgcaggccgtcaatatacagctccccggaatgtgacggagctgaagcttacccgcatatgggaagaagtgcttcaaagcggaccgatcggcgttcacgatcactttttcgagcttggcggccattcattaaaggcgacggcactcgttgcaaaaatagctaaagagtgcagtgtgcaaatcccgctgagcgatgtcttcagccatccgactgtagaagaactcgccaaaatcatcagtgaagcagaagagaacccgttcgcatccatagaaaagacagaaacgaaagaaacatatcctgtctcatccgcccaaaaacggatgtacgtccttcaccagcttgaaaatggcggtgtcagctataacattccagccgttttagaggtgaaggggccgtttgaccgagacaggatggaagccgtgttcaaggaactgatccggcggcatgaaccgctcagaacgtcctttgaagaaaaaaacggcctgcccgtgcagaggattcatgacgacgtgccatttgcatttacagaagaacaatcagccgaagcgtttatccggccgttcgatctcggcaaagcgccccttttccgggcgggatttgtccaaatagaaaaagaccggcatctgcttttagctgacatgcatcatattatttcagacggcgtatccgtcaatcttttgatacgtgaattcagtgagctgtatgctgagagaagtctgccgccgttacggattcaatacaaagattatgccgtctggcagcaatcatttatggcgggcgccgcatatcggaaacaagaggagtactggctgaaccggcttgccggtgagattcccgtgcttgaattgccggctgataagccgcgtcccccggtgcggagcttttccggagaccgggtgtcatttgtcatcaatgaaaaacatacagcacagttgaaaaagctggcgaaagaaaacaaatgcacactgtatatgacgctgctcggtgtgtacacggttctgttagcccgtttaagcggacaggaagatatgatcgtcgggtctccgattgcaggaaggcctcatgccgaccttgacgccgttctgggcatgtttgtcaatacgcttgctttcaggacgcgtcccgacggaagcatgacattcaaagaatatttaaaggaaattcgccaaacagcgcttgaggcttacgaacatcaggattacccgttagaagagctcgtcgataagctcggtgtgccgcgggacatgtcccgaaatccgctgtttgacacaacatttgcgctgcaaaatatggaacagcagaagcttagggcagccggacttgaactgcagccggcagacgtcagcctgccgatttctaaatttgacttatcgctgtacatctctgaaaacgccggtgaattatactgccagtttgaatacagcaccgatttgtttaagagaaaaacgattcaaaaatgggcgggattttttacgacacttgccgaaaacgccgcggctgatccgggcttggaattagacgatatttctgttttgacagaaaaagaagaagcgtctctgcttcaagatttcagccccttgcagaaaacagcgtttccgattcatcagtctcttcatgatctgctggaacagcaagcggaaaaaacgccggaccgtccggcaattttaactgatgacatttcgattacgtatcaggaactgaacgaaagggcaaacgagcttgcgcaccagctgatcaagcgcgggataaggctggaggataaaactgccattatgggccggcgttctcctgacatgatgatcggcatttacgctgtcttaaaagcaggcggtgcatatctgccaattgatccggattacccggaagagcggattcgctttttactgaaagacagcggcgtgaaattcttactggcagaaccagaacttttcgcaccagatctttttgagggagaaacgatctctctgaaaagcggacaaacagggaaccctgaagctgcggccaaccctaacgttccggtaaaccctgattcattggcttatatcatctatacatccggttctacgggacgcccaaaaggcgtgcaggttgaacatcggtcagccgtaaactttttatactcactgcaaacacgttatggattaagtgattctgacatcattttgcataaaacatcatactctttcgacgcttcgatttgggagctgttttggtggccgatcgcgggagcttctgttttcctccttccgcaaggcggcgagaaagaccctgaaatgatactgaacgcattggagaataaccgcataacggcggctcattttgtgccatccatgcttcatgctttcttggaatatataaattccagaaaacagccgatcaaaaaaacctgcttaaaaagggtttttgccggcggcgaacaactgggcccgcacctggtttcccgtttttatgaccttctgccgggaacggaattgacaaattcctacggtccgacggaagcgacagtagaagcggcgtactttgatttgccgcaaggaaaagaatttcacaatgttccgatcggcatttccgggcataacatgcggctttatattttaaatcaaaagaaacagcttctgccgccgggctgtatcggagagctgtacatcgcggggacaggggtggcccggggctatctgaaccggcccgagctgacggaggagcgttttctcgatgatccgttttatccgggagagcgcatgtatcagacgggcgatatcgcacgctggacagaagacggcctagtcgaatggctcggacgttcagacggacaagtgaaagtccgcggctaccggattgaaccgggagaaatcgaagcggcgatccggcgcatcgacggcattcgtgaggcggcggtcaccgcccggaccgaacacggcgaaaccgcgctttacgcctatatcgaaggacgggaaagcgatgacgtgcgggcggagcttgcgacacgccttccggcctacatgatgccggctcagtttatagagatgagcgaatggccggtcacgccgagcggaaagcttgaccgccgcgcgctgccggctcccgacggagcggcagacagacaggcgtacaccgccccgcggaacgtcacggaaatgaagctttgcgccctttgggaagaggtgctgaaaaacggccccgtcggcatccgggatcacttttttgagcggggcggccattcgttaaaagcgacggctctcgtctcccgcatcgccaaagagttcggtgttcaggtgccgttacaagacatcttcgcccggccgacggtggaagagctcgcttcggtcattcaggacttggaagagagcccgtatgaagcgattcagcctgcgcaaaaacaggacacctacccggtgtcttcggcgcagaaacggatgtatgtgctccagcagcttgaagacggcggtgtcggctacaatatgccggctgtgctggaactgacgggcccgcttgaccgcatccggctggaggagacgttccgggagcttgtggagcggcatgagtcgctcagaacgtcctttgaaacggggcctgatggcgaaccggtgcagcgcatccatgacagcgtgccgtttcagctggatgaggccgagtcagctgacgcattcgtccggccgttttgtctggaggaagcgccgctcttccgtgcggccctcgtgaaagaatcggacgaacgtcatcttttattaacggatatgcatcatattatttctgacggtgtgtccgtcaacaccttgattaaagaattcggcgagctgtacgcaggccgttcgcttgcgccgatgcgccttcaatataaagactatgccgtctggcagcggtcatttcaggagaaagaagggtaccagaagcaggaagcctattggctgaagcggcttgaaggagagcttccggtgcttgagcttccggctgacaagccccgtccggctgtcagaagctttgcgggcggcagcgtatcgtgcacgcttgacgctgaaacggcatccggccttcaccgcatcgcccgggatcacggctccactttgtatatggtgcttctcgccgcgtacaatacgttactcgcgagattgagcgggcaggaagacatcatcgtcggctcgccgattgccgggcgtccgcacaaagaccttgaaccgattctcggcatgttcgtcaacacgctcgccatcagaacggagccgaaaggaggcaaacggtttactgattatttggcggaagtccgccaggccgcgcttgaggcgtatgaacatcaggactatccgtttgaagagctagtggagcggctcggggtgcagcgggacacaagccgcaatccgctgtttgacgccatgcttgtcgtccagaatatagagcatgaggaactgctgttggacggtttgcatattcagaatgcggacgtgtcccgtccggtttccaaatttgatgtcactttgcaggcttctgaaggcgggggacagattcattttctgtttgaatatgcggcgtctttattccggaaagaaacgatgcagcgctgggcttcccactttatgacgatgcttgaacacattgtccgtgaaccggaaacttctttacaagcgatcagcatgctgactgctccggaacggaaccggattctttcagactttaacggcatgacggatcaacagctgcctgaaaaaacagttcatgaactgttcatcacccaggcgcgaaaaacacctgatgccgcggcccttatcagcggggaaacattgatcacatacaaagaattagatgactggtcgaataaaatcgccagagccctgcaaaaacggcagatcggacctgatgcagccgtcggcattgtgataccaagatcgccggaacaagtagcggcagtcttcggggtttggaaagccggaggagcttacgtcccgatagatcctgaatatccggaggaacgcaagcaatatatcatctcagacagcggcacagcgcttctccttaccgcacacggtgcgatagaacaagtgcctgatcgttttaacggtgaagtgctcgcactggaggatattcaagaacaggatgcttcgccggtccagtcattatcagcaccggaagatttggcttacatcatttatacatcgggaacgacaggcaggccgaaaggggttatggtcgaacatcgatccgtcagccaaacccttcaatggcggagcggattttatgatctgaatgagaaagatacgattcttcagctcttttcattttcatttgacgggtttgtaacaagcatgttcacaccgctgatttccggtgcgaaagcggccgttttagccgaagatgaagcaagagatattcttgctattaaacactatcttgcatcttaccgcatcactcacatgatcattgttcccgtactgtaccgtacactgcttgacgtactggagccgggggatgcagagtctctcagaattgtcacattagcgggagaagctgtcgaccaaaacattatcagccgcagtttatcagtttgtccacacactgagcttgccaatgagtacggcccgacggaaaacagcgtcgccactacagcggcaagacatatagaacaaagtaagaacatcacgatcggccgtccgattgagcattcacacgtttatattttaaacggagatcatccgcagccgatcggtgtaacgggagaactttgcatttcgggttccggccttgcaagagggtaccgcaatcttcctaagcaaacggcccaagcctttgtccaagacccgttccagaagaaccggcgcatgtaccgcacgggcgacctggcaaaatggctgccggacggcacgctgcagtatatcggccgaatggacgagcaagtcaaaatcagaggctaccgggtggaactgaaagaaattgaatccgccttaacaggcataaaaggagtcaaagaagcagccgtcaccgctctgcccgcatcagcaggccaaacggaactatgcgcttatatcgtgacagaagaaggaacagaaagtgaaactgtgcagcaagcactcagaaatgaaatgcccgcttatatggtgccggcgttctttgaaacacttgaagccctgcctgtcacaccgaacgggaagcttgaccgccgcgcgcttcctgagccgcggaaaaaagcgcacaccggacgggcatttaccgagcctgaaagcgacatggaaaaagagctgtccgcgatttggagcgaagtgctcggaactgaaaacattgccgcggatcaatcattttttgaactgggcggcgattccattaaagccctgcaagtatcagcccgattacatcaggcaggaaaacagatcgccgtaaaagatattttcagccggccgacaattagggagctggcgccttatgtccgtacagagcggcagccggtcagccaagctcctgcagaaggagaagtgaagtggtcgccgattcacaaatggttcttcacacaagacatgaaggaagcaaatcattttaaccagtccgtcatgctgacgagagcaaattcaatagatgaagaggctctgaggaaaacgttaaaagccattaccgttcatcatgatgccttgcgcattgtctgcaaaaaagacgaagagaaaggtcttctcctcttcaacagaccggctgacctcgcagatgagcagctttacagcctgaccatattagaaatggaaggcgatgagcatgagaaggaacgttttgtaaaacgccgcgtcgcagagcttcagagaaacatggatttagagaacgggccgctggtacaggcggggctgttccgctctgaagcagaagattacttgtttctgacggtccatcatctcgctgtcgacgggatatcatggcggattttattggaagacttggcttctgcttatgaacaggccgtctctggacaggaaatcaaactccctccgaaaaccatgtcattcaaaacatatacggagcagctggccgattatgccgaaagtaaacagcttcttcagcaggcggagtattggcgggagattgaacactatgaaacagaaagtcttccttacgaacaggcagatttatctcaaactcctgcaaaaaaacggaacacggtatccttcactctgacagaaagtgaaacggacgccctgttgaaagatgtgcacagtgcctacaatacggatacgcaagatgtgcttttggcttccgccgtgcttgccattcaaaagtggtcgccgcggcacgctttgaaaatcgcccttgaaggacacggacgccaatcagagcaggcaggtgcggacatcagcaggacagtggggtggttcacttccatttacccggtgcttttccggagcggagtttatgaacctcttgaagaatatgaaattcgcacattgaaatccgtcaaagacacattgcggcgcattccggataaagggaacggatacggcgtcctcaaatatttaacaccgccgaagcttgccgggatgactttcgggaaagcaccggagatcagctttaattatctcggacaattcgatgcgcccggcgggaacccggcagaaacggaacagcctgacgcgtttcagttttctcctttgggaggcggagatgatgtgacagatacatggaaacgggagcagtcacttgaaatcagcgcgattgcggcaaaaggccggatgaccgtcagcatttcctatgaaacggagcgcttccggcaagatacgatcgaacggctgtccgaaagctgccggtattatctcctgaaactgtcggaacactgcctcagcaaaaccgatacggagaagaccgtcagtgactttgatgatcgggagctgactgaggaagcattgcaggatattgccgacttactcagcttccactaaaccgagcgggaggaacacatggacaaaacaaaaaatatccaaaatatttatcccctcagccgaatgcaggaaggaatgctttttcattcctttctgcaaaaggagggggctgcatatatcgagcaatccgtcttcaccataaaaggccggcttcgtccggaattgtttgagcaaagcgtacagtctgtcatcagccgtcacgatattttcagaacggtttttttacctcatgtcgctcagctgaacggcccccgccaagttgtgctgcgtgagcgggaattccggctgcaccgcgaagatcttacacatttggacgaagcggaacagagcatctatttacaacgatttaaggaacgtgaccgcttaaaaggctttgacttgcaaaaggatatgctgatgcgcgtttctttgtttaaaacggctgacgaaaaatatgtatgcgtctggagtcaccatcacatccttatggacggctggtgcctcggcatcgtccttcaggaattcatgcatatgtaccgggcgattgaatcaggctcacctgtcacactggcacccgcaaagccttacagcacttatattacatggctgactgctcaggacaaagacgcggcttctgagtattggaaaggatatttagcaggctgcgagacaccctcaggactcccgaaaatatcggcccgtccccaggaaaaaggctaccgcaaggaagagctgctgttttctatagatcaaaacctgacggacaagctgaaaaccatcgccaaagaagagggcgctacgctcgcagttcttatgcagactgtatggggccttatgctgcagcgctacaaccggacggacgatgccgtattcggcgccgtcgtatcagggcggccttccgtcattgacggcgtggaaagcatgatcgggctgtttatcaataccgttccggtacgcattaaaacgggtgacgaaagctttagagaactgctgggccgcttgcagaaagaaatgcttgactcagaggcgttcagctatcatccgcttgctgacatccaatcgcagactgagctgaaacaggatttaatcgaccatattatcgtgtttgaaaattatccgattcagcagcagatgaaagacgcggaaaaggaatcggatgcaccattccggatcgggaatgtcaacgtttcggaacaatcgggctacgattttaacctcatcatagcgcctggcgatgagctgctcatcaaattcagctacaatgcgaacgtttatgacgaagtatggatagagagcgtaaaaggacacttggaagaagctctgcgcggcgccgccttcaatcccgatgttcccgctgatcggcttccgatgctcggacaaaaggaaaaatcaagaataatcggcgaatttaatgacacgaaaacaacttatgaaagagatgaaagcatcatcagcctgttcagccgacaggtgaagaaaaccccggaccatcaggcgcttcacgccggcgggctgacgatgacgtaccgggagctcgatgaacggtcaactgcattcgcccgcaccctgctggaaaacggtctggcgccaaagggaattgccgggattctggccgaacgctcaccggaatttatcatcgctgttctcgctgtattgaaagcgggagggacgtaccttcctcttgatgcagaactgccaaccgacaggatcgccgatatgctcactgagagcggagcacagctgttaacggtacaaaaaggaattgagactgacattgacttttctcacatcatctctatcccggctgcagctgaaaaacaaacacctgatgcgggaaaactgaataccgatacagcacctgatgaccttgcctatattatgtatacatccggttcaacaggaaaaccgaagggcgtgatgatttccaaccgaaacgtcgtatcgctcgtgtcaaacagcaattacacgtcggctggcatgtcggaccgtctcattctgacagggtccatcggttttgatgcagtgacgttcgaaatcttcggagcgcttttgaacggagcatgtcttcatgtggttgaccgctcgacaatgcttgcccctgagaggttcggcaattatctttcttccaaccgtattacgattctgtttttgacgacggcgctctttaaccagttcgcccaggcagatccggagatgttttctgggttgcacaccttatatgtcggcggagaagcattgtccccggcgctcatcaataaggtcagacaccgctgtccgaatctcagcctttataacatatacggaccgacagaaaatacgacattttctaccttttacgaaatcaggcacgatttttctcagccgatcccaatcggaaaaccgatcagcaattcaaccgcgtatatcattgataaaaatggcggacttgcgccgatcggcgtgcccggtgagctttgtgtcggcggtgacggggttgccaaaggctatttaaacaggcctgacttaacaagtgaagcgtttgtcagccacccggttcatcctgaagaaaagatctacaaaacaggcgacttggcacactggctgcctgatggaagcatcggatacatcagccgtatcgaccgccaattcaagattcgcgggaagcggattgagccggccgaaatcgaagcgcgcttgactgaaattgatggaatcagggaagcggcagtcatcgtgtcagacgaaggacaagaagcaatcctttgtgcgtattatacaggcgcacatgttgaagaaagagccattcgatccctgttggccaggtcgcttcccgactatatgattcctcagtatgtgatgaagcttgaccgtatgccgcttaccgcaaacggcaaagtggaccgccgcgggctgcctgcgccagaacggaaaaaaacgtcatcaaaagccgttccgccacgaaactgggtagagcgtgagctgatcgacatttggacgccgatcctcggctgcagggagatgggcatacaggatgacttctttgagctgggcggccattctttgaaagcattgcaagtgattcatcagctgaagaccaggcagcagatggatgtgccgattgaaatgatatttgaatatccgacaattgaacaattggctgaaaagctgtattcaaacacactgacagaagctgcagagcagcatatcagcagactgaaccagtcgaaaggccgcaatcttttctgttttccgcctatctcaggtttcggcattttctttaaagatcttgcggcggcattaaatggacgggctgctgtgtacggttttaactttattgaagaagacagcagaatggaacaatacattgataaaatgctggaaatccagccggaaggcccttatatactcttcggatattcggcaggcggcaatacggcattcgaggcggcaaaagcgatggaaaagcgcggcttagaaatcagcgacgtcattatcgcagacgcgtacagaaagcttgacacattgccgccgcagccaacaaacgcaacagccgaaaatgtcccggaagccgtcagggaagcggtcatccgaaaaacagagcgctatcaaacgtactgggcggaactgataaatgacggccaaatcgcggcaaacctccattttatcgaggccggcataaaggaagagcacagtgataagaccgagccgatgaaatgggaaggcgccacaacgggactctatcaggaatatcaaggcgggggcgcccataaagatatgtttgaacccgcctttgcacagcagaatgctgaggtcatactggacatcattgcaaacagcggaagacgcttggcgcggaatctgtaacatccggcagaatggttcagtatgacagagggcaagataggggaatcaaaccagtttttttggaggctttgacatgacgaacctatcttggcttacgtatgtaatgatcattcttgccagctaccggctgacccatttgatcgtatttgataagattacggaattcataagaaaaccctttataaagcaagaaaaaaccgtcgatcaaaacgggcgcgccgtccaaaaaaaagtcccttcctccgcattcggttatatgctgcaatgttattggtgtgcgggcgtctggtgcgccatattgatcggcatctgctacttggtctggccccgctatgcacatccggttattttcattttgtccatcgccggagcgcaggccattcttgaaacgtgtgtcggcgtcggaacgaaggtcattgacgtgctcgccgctatgaaacataaaaagtcctgaagcgttttgattcgctttaggacttttttctttcccttttaggctgagaggagcaaagcaggctttctgattcaccgcccggaatgcttcggaataccgtaaagcagagagggggaaaaacatgaaaagctgccgttttagcatgatatggtttttggccgttgtactgacagccggcatctttacattctcagcatccgcacaagcaagcggcactcagccggagagagaaatgagagccgtatggatcgcgtctgtcaccaatatcgactggccctctaaaaaagggctgtcaccggaagagcaaaaaagagaatacagcaagctgctggatgacgttcaggagatgggaatgaacgccgttatcgtccaaattaagcctgcggctgatgctttttatccatcagattacgggccttggtcagagtatctgacaggaacacaaggcaaaaatcccggctacgatccgcttgcttttttagttgaagagacacataaacggaatcttgaatttcacgcttggttcaatccttaccggatcacgatgaatcacacaaatttgaatgcgctttcagatgatcatcccgcgcgttcgcatccggactgggtcgctgcatacggaaaacagctgtactacaatccgggcattccggaagtaagacaatttataacggatggaatcaaagaggtggtcagccgttatgacattgatgcggttcatatggatgattatttttatccttataaaattgccggacaggaattccccgatcaggcggaatacgaacggtacggaaaagctcactttgcatcagttgatgactggcgcagggataacgtcaaccggcttgtaaaagaaatcaaccaaaccatcaaacgagaaaaaccttatgtcaaattcggaatcagcccgttcggcgtatggagaaatgccgcagatgacccgacaggctccgaaacggccgcaggggtgcggaactatgatgatttatatgctgatacgagagaatggatccaaaaaggatacattgattacatcgcaccgcaaatttactggagcatcggatttaaagcggcggcatatgacgtcttagcggattggtggggaaaagaagtgaacaatcggccggtgcatttatatatcgggcaggcagcttataaaatcaacaacaacgctgatccggcctgggccgacccgggggaatacggaaggcagattactctaaacaggggatcagcatggataaaaggcagcatgcatttcagtttaaaggatttaaaccgtaatccgctcgatgtaaaaaaccgtttgatcaaagacatgtacagccggcccgcattaattcccgagatgccttggctcggacattccgctttaaaaaaaccggctgtcaaacgggcggagaagaacgcttcaggccatacactctatatcgaagatgcgaaatccaacggtaaaaaaacggcttattacgccatttaccgcgcagaaaagggaaagcagccttatttagtggatacagtcagaaaaacatcgtcacggacgcagacattttcagatactgatattcgggcgaaagaagcctgcacctatttcgttacttccgttgacaggcttcaccatgagagccgtccctccgcaaaacggacaattaaatagccattattaataaaactgaccgttgcggcgctgtcagtttttttgcagcggatgagtccgaatgttcagactttatttggatggaatgaataaagacccccattaataaaatgtagaaagcagcagaaggaggaaggttaatgaattttcaactgacaaaagaacagcagatggtgcgcgaaatggtcagagatttcgccaaaaatgaaattgccccgaaagcccatgaggttgatcaatcggccgtcttcccgatagacacatttaaaaaaataggcgaactcgggctgctcggaattccgtttccggaagaatacggcggggcgggcggtgataccatttcatatgcagcagcggtcgaagaaatcggaaaagcctgcggcagcacggggctgagctacgcggcggccgtgtcactcggcgcaagcccattatactatttcggtactgaccaacaaaagcaagaacatcttattccgcttgcttcgggaaaagcgctcggatcattcgggctgacagagccgaatgccggttccgatgccggcggaacccagacaaaagccgagaaaaagggcgatgactatgtgataaacggagagaaatgctggatcacaaacgcaaattacgcccgcacggtcattgtcaccgccgttacgggaaagaactccgccggaaaaccgatcatttcagctctcatcgtcccgacagacacaccgggatttacgatcacaaatccgtacgacaagatgggtgtgagagggtcggatacggccgaacttgtgctggaggatgtcagggtgcctgccgataacctgctcggtgatcctgaaaaaggttttaaacaatttttatatacattagacggcgggcggatctcgattgcggcactggctgtcggtatcgctcaaggcgcactggaggcatcgctgtcatatgcgaaggaacgcaagcagttcggcagtccgatatcgtcatttcaagccattcaatttaagctggccgatatggcgatggaaattgaccttgccagacagatggtgcttaaagcggcatggctgaaggatcaaaacctgccatttacgaaagaagctgcattcgccaagctttatgcttcagaaatggccgtcagaacatgccttcaggccatccaaattcatggcggttccggttatatgaaggaatgcggtgtcgaacgtatgcttcgtgacgcaaagctgatggagattggcgaaggaacgtcagaaattcaaagaatggtcatcgcaagacagcttttgaagtgaaatgaaaacgtttactaagacagggatggaagggggcaggtcatatggctgaacttatccatttaacagccggaaagctgcttgagcggaccgcggagctttttccggatcgtgaagcggttgtttaccctgagcgcggccttcgttatacgtatgccgagtttgaccggttatgccggcaaaccgcaaaagggctgatgaagctgggagttgaaaaaggagatcatgttgccatatgggcatccaacattccggaatggctcgcggcgcaatttgcaacggcgaaaatcggcgccgttctggtcaccattaataccaattttcaaatcgcagagctcgattatctgctggcacattcagacgtctcggccttgataatcatggattcctaccggcagacatcttatgttgagatggtgaataagctaattccggagctgaaaacttgtgagcgcggcaggctgcgttcgaaacgttatccctttttaaggacggtgttatatatcggtgataaaagcctgcccgggatgcaccgttgggattcattgctggataatgccgaagctgtaacggatgcagcgcttgacggaaggatggacagcctgaaaaaggatgattgcattcatatgcaatatacatcaggtacgaccggatttccgaaaggcgtcatgctctcacattttaatatcgtaaataacgcggccaatatcgcagaatgcatgaagcttacttcatgtgaccgtttatgtattcccgtgccgtttttccactgctttgggtgcgtgctcggcgtgctggcatgtgtttccgcgggtgcggcgatgattccgatcgaacagttttctccgccggccgttctgaaaacggtggagcaagaagcctgcacggctctgcacggtgtaccgacgatgtttatcgccctcctaaatgacagccgtttttctgaatatgatctttcccacgtccgaaccgggattatggcaggctcgccatgcccggcggaagtcatgagagaagtgatcggcaaaatggggatgactgacattacaattgcctacggacagaccgaagcatcacctgtcattacgcagacaagaacagatgatccgtttgaaagaagagtggaaacagcggggcgcgcgcttccccatatcgaagtcagaatcgttcggcccggaacatccggagaagccgccaggggcgaacaaggagagctctgcacccgcggatatcatgtcatgaaaggctattataaaaatcaagaagcgaccgaagaagcgatagacaaagacggctggctgcataccggtgatttggcggtcatggacgaggacggatactgcaaaatcacgggccgtctgaaagacatgctgatcaggggcggcgaaaatatctatccgcgcgagattgaggaaatgttatatcggcatcccgcagtggcggacgttcaggtcgtcggcgttcctgatccgaaatacggagaagaggccgcggcgtggatcaggctcaaagacggacaaaccgcttccgcagaagacatcagaaccttttgcaaagaacatatcgcccgctataaagtccccaggtatgttttgtttacagatgaatatccaatgacagcctcaggaaaaattcagaaattcaagctgcgggaaaaaacgattgaagagctcaagttaacttaatgaaaaaggagtgcttcacatttgtttaaaaaagtcctgattgccaacagaggagaaatcgccttacgaattatccgcacctgcaaacgtctcggcatcccctcggcagctgtgtattcagaagccgaccgggacgcgctgcatgtaaaagcggctgatgaggcctatccgatcggtaaatcgagagtaaatgaaagctatttacatatcgacagaatcatagaagccgccaaatccgccggagcggacgccattcatccgggctacgggcttctgtcagaaaacagcctgttcgccgaacgctgccggaaggaacaaatcacatttatcggtccgcccggtgatatcatcgccaagatgggcagcaagattgaagcccgaaaaacgatgcaaaaagcaaaggtcccgatcgttcccggtgtttcagagccattgcccgatgttcactccgccttagccgaagcccgtgccatcggttttccggtcatgctgaaagcgtccgcaggaggaggcggaatcggcatgcagatcgtacattcagaagaagagctggccaaagcgttcgaaggaaatcaaaagcgggccgcgtccttttttggagacggcgcaatgtacatggaaaaggtcattgaaaatgcccgtcatattgaaattcagatactcgcagattctttcggcaacaccgttcatctgtttgaacgtgactgttcagtccaaaggcgccaccaaaaagtgatagaagaagcgccgtcgccgtttgttgacgatgaattaagacaaagactcggtgaaaccgccgttaaagccgcaaaatcgatcggctaccaaaatgcaggcacaatagaatttctcgtcgaccaaaagaaacaaatctattttttagagatgaacaccagactgcaggtggagcatccggtgacagaagaaattacaggactggatcttgtggaagaacagctgaaaattgccgctgggcaggcgctgcctttctcgcagaaagatatcaaccactgcggtcatgcgatagaagtgcggatttatgcggaagatccggtcaccttttacccgtctcccggtaccatctcgtctttttccgttttaagacacccgtcagtgcgacacgaatgcgccgtcgaaaagggaagcgtcatttctccgttttacgatccgatgattgccaaaatggtcgtcacggcgaatacgagaaaacaagccattgaacaactgaaaaccgcccttggcgaatatcatgtagaagggattaaaaccaacattccgctgctgacaaaaatttcccattcagaagggtttgaaaagggcgaggcaacaaccggttttttacaaacaatgaacgagggggcgtcaaaatgagcgtcataaaaattcaaatggcgggaaacctgtggaaaattcatgtgaagccgggtgatgtcattgaagaaggacaggaagtggccatcttggaatctatgaaaatggaaattccgattatcgctgatgcagcgggtacggtgaaagaagtgaaaaaatcagaaggtgatttcactgatgaaggagaggtcctgattgaacttcaataaaacgggaggtgcagcatgaactgtccgaaacatgtccgcatcaatgaagtaggaccgcgtgacggcttgcagaatgaatcggcgtgggtggatacagaagataagattgagtggatcaatatgctgtcaaaaacaggtcttccctatatcgaagtgacatcattcgtgcatccgagatggattccggctcttcgtgacagcctggacgtcgcaaaaggcattgccagatctgaacatacggtctacgcggctctcgttccgaacctcatcggactggagcatgcggcagaaggcggaatcgatcaggcatgtgtatttttatctgcaagcgaaacccataaccaaaaaaacgtaaacaaaccgattgaccggaccgttcaagagctcaggcgggttattactgaagcaaaagctgaaaaaatggcgacgagagcttatctgtccactgtgttcggctgtccgtacgaacagaacgtgccggtagaacaagtcatccgcctgtcagacaccctgctcgaaatgggtgttgatgaaatatcgctcggcgacacgatcggcgcggcaaaccccttgcaggtcatagccgtgcttgaagcccttttgccgagaattcccgcctcaaaaattgcactccatttccatgatacaagaggaacggctctagcgaatatcattcccgctcttgatatgggcatcacatcctttgatacttcctcaggcgggcttggcggctgcccgtacgcccctggatcagcaggaaacgctgccacagaagacgtcatttatatgctcgaacaaatggggattgataccgggacggacatgaataaacttctttatgccgccggctggatcgcggataaaataggcaaagacctgccaagcagaaacctgcaggcattcagaacgaaatgagaaaggagaagccatgggagattgcgtcttgtattccgtctgtcaagaaacgatcggtctgatcacgctgaaccgcccgcatgcggccaactcgctgtcttcagacatgattgatcatttacagcgtgtgattgaagacatcaaaaactcgccatccattcgttgtgtcattctcaccggcactgggaacacattttgcgccggtgctgatttaaaagaaagagcggggatgaatcatgaacaagttaagcaaagcgtcaggcgtatcggtgaaacggccgcatccattgaagctctcccgcagccggtcattgcagcgctgaacggaaccgctgtcggaggaggccttgaactcgccctcgcctgtgatatcagaatcgccgtcagccgggcgggcctcggccttcctgaaacagggcttgcgatcattcccggagcgggcggaacgcagagactgccccggcttatcggccccggcgcggcaaaagaattgatctataccggccgaaggctttctgccgaagagggaaaagacatgaagctgatcgagcatgtttgtgaagccggtgaacttatggaaaaagcaaaagcactggccggccgcatcgccgctaatgggccgatcgccgtcagacaagcaaaatccgcgataaacaagggtctggagacagatctcaatacaggactcgaaatcgaacgaaaagcatatgaacaagtcatccccacacttgacagagaagagggcctgcgcgcttttaaagaaaaaagaccccctgaatacaaaggaaaataaaacatggagggactcggatggattacgaaaaagaacggcagacacgcagcaaaacgattgaaaagggaggagccgcgaaatatcacgcaagcaacgaaaagaagggaaaactttttgtaagagacaggctgaagcttttattcgatgacggcatatccgttgaagacgcttttttcgccgagtgcatgtcagacggactgccggctgacggggtcgttaccgggatcggaaccatcggcggcagaaccgtttgtgtgatggcaaacgactcaaccgtaaaggcgggctcgtggggcgcgaaaacggtggaaaaaatcatccgcattcaggagacggcggaaaagcttcagtgtccgctcttgtacttagtcgattccgcaggtgcgagaattacggatcaggtcgacatgttcccgggcagaaggggagccggccgcatcttttataatcaagtaaagctgtcgggccgcattccgcaaatctgtttattgttcggcccttccgctgcgggcggcgcttacattccggccttttgcgacattgtcattatggttgagggcaatgcatccatgtacttaggttccccgcgtatggcagaaatggtgattggcgagaaagtatcgcttgaagaaatgggcggcgcccgtatgcattgttccgtatcaggctgcggtgatctcctcgcccggacggaacaggaagcaatcatgatggcgcagacatatctcagctactttccggcaaattatactgaaaaagcgcccgtcaacaaatctaagaacccgaaagcttttgaaaaaccgctctcagatgtcatcccggcacatcaaaacgcaccgttcaacatgatggatttaattgaacgtgtcattgatgaagactcattttttgagattaaaccgttatttgcgcaggaattaataacggggcttgcgcggattcacggacagccggtcggcattatcgccaatcagccgcgtgtcaaaggcggggttttatttctcgattcggcggataaagccgcaaaatttatcgctttgtgcgacgcattccatattccgcttctgtttttagcagacattcccggattcatgatcggaacgaaggttgagcaggcgggcatcatcaggcatggcgcaaaaatgatctccgcaatggcggaagcgactgttccgaagctttccgttatcgtcagaaaagcctacggtgccggattatacgcgatggcggggcctgcttttgaaccggactgctgtttagcgcttccgactgcgcaaattgccgtaatgggtcctgaagcagcggtgaatgcggtctacgcaaacaaaatcagcgagctagcccctgaagaaaggccggcttttattcaagaaaagcgtgatgaatataaggaagacattaacctttaccggcttgcttctgaaatggtgattgacggcattgttcctgctgattccttgcgggaagaactcaataaacgcctcactgcttacatgtccaaacaactgacattcacacaccggaaacaccccgtatacccggtataaataaaaaaaagactgcatagatccggctcgcagccgttcttatgcagtcttttttcatagtcttgatctcattttcttcacaacaaaataaacaacaataaatacgagagccaatataatgatcggagttgtatacattccggcatagctgtctacgtctttccactgtcccccgagctgatacccgagataaacgaaaatgacagaccacggaataatggcgagcgtcgtcaatatgacaaacttggaaagaggcattttcgcaaggccggccgggatggagatcgcatgtctgacgaccgggataaaccgcgccgagaacacaacgccggcgccgtaacggcgaaaccagttttccgcaacatcaacatgatgctttttcagaagtaagtacttgccgtacttgtccaaaaacggccgtcccccataacgggcgatccagtaaataaagcactgcgcgatcgttcccccgatcacaccggcgacaatggcgccgataaagctgatcgtgccttctgacaccatatagcctccgtaagccagaacgatttcactcggaatgat
